(19) United States
(12) Patent Application Publication
(10) Pub. No.: US 2010/0120681 A1
(43) Pub. Date: May 13, 2010

(54) AMINO ACID SEQUENCES DIRECTED AGAINST VASCULAR ENDOTHELIAL GROWTH FACTOR AND POLYPEPTIDES COMPRISING THE SAME FOR THE TREATMENT OF CONDITIONS AND DISEASES CHARACTERIZED BY EXCESSIVE AND/OR PATHOLOGICAL ANGIOGENESIS OR NEOVASCULARIZATION

(75) Inventors: Pascal Gerard Merchiers, Tielen (BE); Peter Verheesen, Gent (BE); Hendricus Renerus Jacobus Mattheus Hoogenboom, Maastricht (NL)

Correspondence Address: WOLF GREENFIELD & SACKS, P.C., 600 ATLANTIC AVENUE, BOSTON, MA, 02210-2206, US

(73) Assignee: Ablynx N.V., Ghent-Zwijnaarde (BE)

(21) Appl. No.: 12/523,256

(22) PCT Filed: Feb. 21, 2008
(86) PCT No.: PCT/EP08/52119

§ 371 Date: Nov. 13, 2009

Related U.S. Application Data
(60) Provisional application No. 60/902,532, filed on Feb. 21, 2007.
(60) Provisional application No. 61/015,957, filed on Dec. 21, 2007.

(51) Int. Cl. A61K 38/16; C07K 14/00; C12P 21/00; C07H 21/00; A61P 35/00

(52) U.S. Cl. 514/12; 530/350; 435/69.1; 536/23.1

(57) ABSTRACT

The present invention relates to amino acid sequences that are directed against vascular endothelial growth factor (VEGF), as well as to compounds or constructs, and in particular proteins and polypeptides, that comprise or essentially consist of one or more such amino acid sequences. The amino acid sequences, compounds and constructs can be used for prophylactic, therapeutic or diagnostic purposes, such as for the treatment of conditions and diseases characterized by excessive and/or pathological angiogenesis or neovascularization.

[0001] The present invention relates to amino acid sequences that are directed against (as defined herein) vascular endothelial growth factor (VEGF), as well as to compounds or constructs, and in particular proteins and polypeptides, that comprise or essentially consist of one or more such amino acid sequences (also referred to herein as “amino acid sequences of the invention”, “compounds of the invention”, and “polypeptides of the invention”, respectively).

[0002] The invention also relates to nucleic acids encoding such amino acid sequences and polypeptides (also referred to herein as “nucleic acids of the invention” or “nucleotide sequences of the invention”); to methods for preparing such amino acid sequences and polypeptides; to host cells expressing or capable of expressing such amino acid sequences or polypeptides; to compositions, and in particular to pharmaceutical compositions, that comprise such amino acid sequences, polypeptides, nucleic acids and/or host cells; and to uses of such amino acid sequences or polypeptides, nucleic acids, host cells and/or compositions, in particular for prophylactic, therapeutic or diagnostic purposes, such as the prophylactic, therapeutic or diagnostic purposes mentioned herein.

[0003] Other aspects, embodiments, advantages and applications of the invention will become clear from the further description herein.

[0004] Angiogenesis is an important cellular event in which vascular endothelial cells proliferate, prune and reorganize to form new vessels from preexisting vascular network. The development of a vascular supply is essential for normal and pathological proliferative processes (Folkman and Klagsbrun Science 1987, 235: 442-447). Delivery of oxygen and nutrients, as well as the removal of catabolic products, represent rate-limiting steps in the majority of growth processes occurring in multicellular organisms. In adults, angiogenesis is tightly controlled by an “angiogenic balance”, i.e. a physiological balance between the stimulatory and inhibitory signals for blood vessel growth. In normal circumstances, the formation of new blood vessels occurs during wound healing, organ regeneration, and in the female reproductive system during ovulation, menstruation, and formation of the placenta. It is also an important factor in several pathological processes such as tumor growth, rheumatoid arthritis, diabetic retinopathy, age-related macular degeneration, and psoriasis.

[0005] In view of the remarkable physiological and pathological importance of angiogenesis, much work has been dedicated to the elucidation of the factors capable of regulating this process. It is suggested that the angiogenesis process is regulated by a balance between pro and anti-angiogenic molecules, and is derailed in various diseases, especially cancer (Carmeliet and Jain Nature 2000, 407: 249-257). A switch to the angiogenic phenotype depends on a local change in the balance between angiogenic stimulators and inhibitors.

[0006] One of the most important pro-angiogenic factors is vascular endothelial growth factor (VEGF), also termed VEGF-A or vascular permeability factor (VPF). VEGF belongs to a gene family that includes placenta growth factor (PIGF) (Maglione et al. Proc. Natl. Acad. Sci USA 1991, 88: 9267-9271; Maglione et al. Oncogene 1993, 8: 925-931), VEGF-B (Olofsson et al. Proc. Natl. Acad. Sci USA 1996, 93: 2576-2581), VEGF-C (Joukov et al. EMBO J. 1996, 15: 1751-1758; Lee et al. Proc. Natl. Acad. Sci USA 1996, 93: 1988-1992), VEGF-D (Orlandini et al. Proc. Natl. Acad. Sci USA 1996, 93: 11675-11680, Achen et al. Proc. Natl. Acad. Sci USA 1998, 95: 548-553), VEGF-E (Hoeben et al. Pharmacol. Rev. 2004, 56: 549-580) and VEGF-F (Hoeben et al. Pharmacol. Rev. 2004, 56: 549-580). Human VEGF exists as at least six isoforms (VEGF121, VEGF145, VEGF165, VEGF183, VEGF189, and VEGF206) that arise from alternative splicing of mRNA of a single gene (Ferrara and Davis-Smyth Endocr. Rev. 1997, 18: 1-22). VEGF165, the most abundant isoform, is a basic, heparin binding, dimeric glycoprotein with a molecular mass of 45,000 daltons.

[0007] Two VEGF tyrosine kinase receptors (VEGFR) have been identified that interact with VEGF, the fms-like tyrosine kinase Flt-1 (VEGFR-1 or Flt-1) and the kinase domain region, also referred to as fetal liver kinase (VEGFR-2, KDR or Flk-1) (Shibuya et al. Oncogene 1990, 5: 519-24; Matthews et al. Proc. Natl. Acad. Sci. USA 1991, 88: 9026-30; Terman et al. Oncogene 1991, 6: 1677-83; Terman et al. Biochem. Biophys. Res. Commun. 1992, 187: 1579-86; de Vries et al., Science 1992, 255: 989-91; Millauer et al. Cell 1993, 72: 835- 46; Quinn et al. Proc. Natl. Acad. Sci. USA 1993, 90: 7533-7). VEGFR-1 has the highest affinity for VEGF, with a Kd of 10-20 pM (de Vries et al. Science 1992, 255: 989- 91), and VEGFR-2 has a somewhat lower affinity for VEGF, with a Kd of 75-125 pM (Terman et al., Oncogene 1991, 6: 1677-83; Millauer et al. Cell 1993, 72: 835-46; Quinn et al. Proc. Natl. Acad. Sci. USA 1993, 90: 7533-7). A further detailed description of VEGF, the interaction of VEGF with its receptors and the function of VEGF in normal and pathological processes can be found in Hoeben et al. (Pharmacol. Rev. 2004, 56: 549-580) and Ferrara (Endocrine Rev. 2004, 25: 581-611).

[0008] VEGF has been reported as a pivotal regulator of both normal and abnormal angiogenesis (Ferrara and Davis-Smyth Endocrine Rev. 1997,18: 4-25; Ferrara J. Mol. Med. 1999, 77: 527-543). Compared to other growth factors that contribute to the processes of vascular formation, VEGF is unique in its high specificity for endothelial cells within the vascular system. VEGF is essential for embryonic vasculogenesis and angiogenesis (Carmeliet et al. Nature 1996, 380: 435-439; Ferrara et al. Nature 1996, 380: 439-442). Furthermore, VEGF is required for the cyclical blood vessel proliferation in the female reproductive tract and for bone growth and cartilage formation (Ferrara et al. Nature Med. 1998, 4: 336-340; Gerber et al. Nature Med. 1999, 5:623-628).

[0009] In addition to being an angiogenic factor in angiogenesis and vasculogenesis, VEGF, as a pleiotropic growth factor, exhibits multiple biological effects in other physiological processes, such as endothelial cell survival, vessel permeability and vasodilation, monocyte chemotaxis and calcium influx (Ferrara and Davis-Smyth Endocrine Rev. 1997, 18: 4-25). Moreover, recent studies have reported mitogenic effects of VEGF on a few non-endothelial cell types, such as retinal pigment epithelial cells, pancreatic duct cells and Schwann cells (Guerrin et al. J. Cell Physiol. 1995, 164: 385-394; Oberg-Welsh et al. Mol. Cell. Endocrinol. 1997, 126: 125-132; Sondell et al. J. Neurosci. 1999, 19:5731-5740).

[0010] VEGF is also implicated in the development of conditions or diseases that involve pathological angiogenesis. The VEGF mRNA is overexpressed by the majority of human tumors examined (Berkman et al. J Clin Invest 1993, 91: 153-159; Brown et al. Cancer Res. 1993, 53: 4727- 4735; Brown et al. Human Pathol. 1995, 26: 86-91; Dvorak et al. Am J. Pathol. 1995, 146: 1029-1039; Mattern et al. Brit. J. Cancer. 1996, 73: 931-934).

[0011] The concentration of VEGF in eye fluids is highly correlated to the presence of active proliferation of blood vessels in patients with diabetic and other ischemia-related retinopathies (Aiello et al. N. Engl. J. Med. 1994, 331: 1480-1487).

[0012] Furthermore, recent studies have demonstrated the localization of VEGF in choroidal neovascular membranes in patients affected by AMD (Lopez et al. Invest. Ophtalmo. Vis. Sci. 1996, 37: 855-868). Age-related macular degeneration (AMD) is a leading cause of severe visual loss in the elderly population. The exudative form of AMD is characterized by choroidal neovascularization and retinal pigment epithelial cell detachment.

[0013] VEGF up-regulation has also been observed in various inflammatory disorders (Dvorak J. Clin. Oncol. 2002, 20: 4368-4380). VEGF has been implicated in the pathogenesis of RA, an inflammatory disease in which angiogenesis plays a significant role (Koch et al. J. Immunol. 1994, 152: 4149-4156; Fava et al. J. Exp. Med. 1994, 180: 341-346). VEGF is strongly expressed by epidermal keratinocytes in wound healing and psoriasis, conditions that are characterized by increased microvascular permeability and angiogenesis (Detmar et al. J. invest. Dermatol. 1995, 105: 44-50). VEGF up-regulation has also been observed in the development of brain edema. Diffuse, low-abundance, VEGF mRNA expression has been observed in the adult rat brain (Monacci et at Am. J. Physiol. 1993, 264: C995-C 1002).

[0014] The elucidation of VEGF and its role in angiogenesis and different processes has provided a potential new target of therapeutic intervention. The VEGF function has been inhibited by small molecules that block or prevent activation of VEGF receptor tyrosine kinases (Schlaeppi and Wood Cancer Metastasis Rev. 1999, 18: 473-481) and consequently interfere with the VEGF signal transduction pathway. Tumor cell-specific cytotoxic conjugates containing bacterial or plant toxins can inhibit the stimulating effect of VEGF on tumor angiogenesis. VEGF₁₆₅-DT385 conjugates (diphtheria toxin domains fused or chemically conjugated to VEGF₁₆₅), for example, efficiently inhibit tumor growth in vivo (Olson et al. Int. J. Cancer 1997, 73: 865-870). Tumor growth inhibition was also demonstrated with a retrovirus-delivered Flk-1 mutant (Millauer et al. Nature 1994, 367: 576-579) and soluble VEGF receptors (Kong et al. Hum. Gene Ther. 1998, 9: 823-833; Goldman et al. Proc. Natl. Acad. Sci. USA 1998, 95: 8795-8800; Gerber et al. Cancer Res. 2000, 60: 6253-6258; Kuo et al. Proc. Natl. Acad. Sci USA 2001, 98: 4605-4610; Holash et al. Proc. Natl. Acad. Sci. USA 2002, 99: 11393-11398).

[0015] VEGF-neutralizing antibodies, such as A4.6.1 and MV833, have been developed to block VEGF from binding to its receptors and have shown preclinical antitumor activity (Kim et al. Nature 1993, 362: 841-844; Folkman Nat. Med. 1995, 1: 27-31; Presta et al. Cancer Res. 1997, 57: 4593-4599; Kanai et al. Int. J. Cancer 1998, 77: 933-936; Ferrara and Alitalo Nat. Med. 1999, 5:1359-1364; 320, 340). Anti-VEGF antibody treatment generally converts fast-growing, angiogenesis-dependent, human tumor xenografts transplanted subcutaneously in nude or sever combined immune deficiency mice into small, avascularized microcolonies.

[0016] For a review of anti-VEGF approaches in clinical trials, see Campochiaro and Hackett (Oncogene 2003, 22: 6537-6548).

[0017] Most clinical experience has been obtained with A4.6.1, also called bevacizumab (Avastin®; Genentech, San Francisco, Calif.) (Bunn In: Proceedings of the Annual Meeting of the American Society of Clinical Oncology 2001, May 12-15, San Francisco, Vol. 20, pp 395-406, American Society of Clinical Oncology, Chestnut Hill, Mass.; Margolin et al. J. Clin. Oncol. 2001, 19: 851-856). Avastin in combination with chemotherapy is FDA approved or in clinical trial for a large number of cancer indications. This product combination, however, is plagued by side-effects (hemorrhages, arterial thromboembolism, hypertension, gastrointestinal (GI) perforations, wound healing problems, proteinuria and congestive heart failure) which are primarily due to the fact that the anti-VEGF activity is not restricted to the site of the tumor, but persists in circulation over a long period of time. This results in a shift of physiological to pathophysiological activity of the peripheral endothelial cells.

[0018] Anti-VEGF strategies are also FDA approved for AMD patients, using a recombinant humanized anti-VEGF Fab (rhuFab VEGF, Ranibizumab or Lucentis™) (Chen et al. J. Mol. Biol. 1999, 293: 865-881; Ferrara et al. Retina 2006, 26: 859-870). rhuFab VEGF has been found to reduce angiogenesis and vascular leakage in a primate model of AMD (Krzystolik et al. Arch. Ophthalmol. 2002, 120: 338-346). Local delivery of VEGF inhibitors to the eye causes fewer side effects than systemic administration. High intraocular concentrations can be achieved by intravitreal injections. Repeated injections for the treatment of a chronic disease such as diabetic retinopathy is, however, not ideal because of the risk of endophthalmitis, vitreous hemorrhage, and retinal detachment.

[0019] Nanobodies (as further defined herein) are more potent and more stable than conventional four-chain antibodies which leads to (1) lower dosage forms, less frequent dosage leading to less side effects; and (2) improved stability leading to a broader choice of administration routes, comprising oral or subcutaneous routes and slow-release formulations in addition to the intravenous route. Slow-release formulation with stable anti-VEGF Nanobodies, for example, could be advantageous for treatment of AMD, avoiding the need of repeated injections and the side effects associated with it. In addition, their small size and short half-fifes makes them specifically suited for treatment of AMD. The small size will facilitate the penetration of the Nanobodies deeper into the eye to reach the choroidal vessels.

[0020] Because of their small size, Nanobodies have the ability to cross membranes and penetrate into physicological compartments, tissues and organs not accessible to other, larger polypeptides and proteins. The small-sized Nanobodies have a shorter half-life and accumulate rapid in the kidney and bladder where they stay for more than 48 hours. This makes them also ideally suited for the treatment of renal cell carcinoma and bladder cancer. Upon systemic administration of, for example, an anti-VEGF Nanobody, there would be a low anti-VEGF activity in the circulation with a reduced risk of side effects, while obtaining a high anti-VEGF activity at the side of the tumor and an effective treatment of the kidney or bladder carcinoma.

[0021] Because of their small size, Nanobodies can also selectively bind a specific epitope on VEGF (such as e.g. the VEGFR-2 binding site) while not (sterically) blocking other epitopes (such as e.g. the VEGFR-1 binding site). This may result in a selective inhibition of certain biological processes, while other biological processes are not inhibited, reducing the risk of side effects. It has indeed been shown that a monoclonal antibody (2C3) that blocks the binding of VEGF to VEGFR-2, but not to VEGFR-1, causes apoptosis of the endothelial cells of newly formed immature vessels, which are dependent on VEGF to maintain cell adhesion to a provisional extracellular matrix until periendothelial cells facilitate a more prermanent mode of adhesion, while the integrity of mature vessels is not influenced by this antiangiogenic therapy (Brekken et al. Cancer Res. 2000, 60: 5117-5124).

[0022] The small size of the Nanobody also makes them ideally suited for the preparation of bispecific, or multispecific polypeptides. A bispecific anti-VEGF/anti-VEGFR Nanobody or a bispecific anti-VEGF/anti-tumor Nanobody, for example, will specifically target the tumor side, while the anti-VEGF activity in the circulation remains low with a reduced the risk of side effects. Bispecific Nanobodies binding to two different epitopes on VEGF (e.g. the VEGFR-1 binding site and the VEGFR-2 binding site) might be advantageous because of their higher potency.

[0023] The polypeptides and compositions of the present invention can generally be used to modulate, and in particular inhibit and/or prevent, binding of VEGF to VEGFR, and thus to modulate, and in particular inhibit or prevent, the signalling that is mediated by VEGF and/or VEGFR, to modulate the biological pathways in which VEGF and/or VEGFR are involved, and/or to modulate the biological mechanisms, responses and effects associated with such signalling or these pathways.

[0024] As such, the polypeptides and compositions of the present invention can be used for the prevention and treatment (as defined herein) of conditions and diseases characterized by excessive and/or pathological angiogenesis or neovascularization. Generally, “conditions and diseases characterized by excessive and/or pathological angiogenesis or neovascularization” can be defined as diseases and disorders that can be prevented and/or treated, respectively, by suitably administering to a subject in need thereof (i.e. having the disease or disorder or at least one symptom thereof and/or at risk of attracting or developing the disease or disorder) of either a polypeptide or composition of the invention (and in particular, of a pharmaceutically active amount thereof) and/or of a known active principle active against VEGF or a biological pathway or mechanism in which VEGF is involved (and in particular, of a pharmaceutically active amount thereof). Examples of such conditions and diseases characterized by excessive and/or pathological angiogenesis or neovascularization will be clear to the skilled person based on the disclosure herein, and for example include the following diseases and disorders: various neoplastic conditions including but not limited to tumors, and especially solid malignant tumors (Hoeben et al. Pharmacol. Rev. 2004, 56: 549-579), breast carcinomas (Yoshiji et al. Cancer Res. 1996, 56: 2013-2016; Brown et al. Hum. Pathol. 1998, 26: 86-91; Linderholm et al. Cancer Res. 2000, 61: 2256-2260; Fox et al. Lancet Oncol. 2001, 2: 278-289; Gasparini Crit. Rev. Oncol. Hematol. 2001, 37: 97-114), lung carcinomas such as nonsmall cell lung cancer (Giatromanolaki et al. J. Pathol. 1996, 179: 80-88; Volm et al. Anticancer Res. 1997, 17: 99-103; Volm et al. Int. J. Cancer 1997, 64-68; Bunn In: Proceedings of the Annual Meeting of the American Society of Clinical Oncology 2001, May 12-15, San Francisco, Vol. 20, pp 395-406, American Society of Clinical Oncology, Chestnut Hill, Mass.; Fox et al. Lancet Oncol. 2001, 2: 278-289), gastric carcinomas (Brown et al. Cancer Res. 1993, 53: 4727-4735; Suzuki et al. Cancer Res. 1996, 56: 3004-3009; Maeda et al. Cancer 1996, 77: 858-863; Ellis et al. Eur. J. Cancer 1998, 34:

[0025] 337-340; Uchida et al. Br. J. Cancer 1998, 77: 1704-1709; Fox et al. Lancet Oncol. 2001, 2: 278-289), esophageal carcinomas, colorectal carcinomas (Papamicheal Anticancer Res. 2001, 21: 4349-4353), liver carcinomas, ovarian carcinomas (Olson et al. Cancer Res. 1994, 54: 276-280; Sowter et al. Lab. Invest. 1997, 77: 607-614; Yamamoto et al. Br. J. Cancer 1997, 76: 1221-1227), thecomas, arrhenoblastomas, cervical carcinomas, endometrial carcinoma (Guidi et al. Cancer 1996, 78: 454-460), endometrial hyperplasia, endometriosis (McLaren et al. J. Clin. Invest. 1996, 98: 482-489; Shifren et al. J. Clin. Endocrinol. Metab. 1996, 81: 3112-3118; Hull et al. J. Clin. Endocrinol. Metab. 2003, 88: 2889-2899; Hoeben et al. Pharmacol. Rev. 2004, 56: 549-579), fibrosarcomas, choriocarcinoma, head and neck cancer, nasopharyngeal carcinoma, laryngeal carcinomas, hepatoblastoma, Kaposils sarcoma, melanoma, skin carcinomas, hemangioma, cavernous hemangioma, hemangioblastoma (Berkman et al. J. Clin. Invest. 1993, 91: 153-159; Wizigmann et al. Cancer Res. 1995, 155: 1358-1364), pancreas carcinomas, retinoblastoma, astrocytoma, glioblastoma (Shweiki et al. Nature 1992, 359: 843-845; Plate et al. Nature 1992, 359: 845-848; Phillips et al. Int. J. Oncol. 1993, 2: 913-919), Schwannoma, oligodendroglioma, medulloblastoma, neuroblastomas, rhabdomyosarcoma, osteogenic sarcoma, leiomyosarcomas, urinary tract carcinomas, kidney tumors (Brown et al. Am. J. Pathol. 1993, 143: 1255-1262; Nicol et al. J. Urol. 1997, 157: 1482-1486; Tomisawa et al. Eur. J. Cancer 1999, 35: 133-137), bladder tumors (Brown et al. Am. J. Pathol. 1993, 143: 1255-1262), thyroid carcinomas (Soh et al. J. Clin. Endocrinol. Metab. 1997, 82: 3741-3747; Klein et al. J. Clin. Endocrinol. Metab. 2001, 86: 656-658), Wilm's tumor, renal cell carcinoma, prostate carcinoma (Joseph et al. Clin. Cancer Res. 1997, 3: 2507-2511; Balbay et al. Clin. Cancer Res. 1999, 5: 783-789), abnormal vascular proliferation associated with phakomatoses, Meigs syndrome, hematological malignancies (Gerber and Ferrara J. Mol. Med. 2003, 81: 20-31) such as T cell lymphoma, acute lymphoblastic leukemia, Burkitt's lymphoma, acute lymphocytic leukemia, histiocytic lymphoma, promyelocytic leukemia, etc.; various non-neoplastic diseases and conditions including but not limited to rheumatoid arthritis (Koch et al. J. Immunol. 1994, 152: 4149-4156; Fava et al. J. Exp. Med. 1994, 180: 341-346; Walsh, Rheumatology (Oxford) 1999, 38: 103-112; Ballara et al. Int. J. Exp. Pathol. 1999, 80: 235-250; Ikeda et al. J. Pathol. 2000, 191: 426-433; de Brandt et al. Arthritis Rheum. 2000, 43: 2056-63; Lee et al. Clin. Exp. Rheumatol. 2001, 19: 321-324; Ballara et al. Arthritis Rheum. 2001, 44: 2055-2064), osteoarthritis (Walsh, Rheumatology (Oxford) 1999, 38: 103-112), psoriasis (Bhusan et al. 1999, atherosclerosis, diabetic and other retinopathies (Aiello et al. N. Engl. J. Med. 1994, 331: 1480-1487; Malecaze et al. Arch. Ophthalmol. 1994, 112: 1476-1482; Duh and Aiello Diabetes 1999, 48: 1899-1906; Chakrabarti et al. Diabetes Metab. Res. Rev. 2000, 16: 393-407; Ozaki et at. Am. J. Pathol. 2000, 156: 697-707), retrolental fibroplasia, neovascular glaucoma, age-related macular degeneration (AMD) (Lopez et al. Invest. Ophthalmol. Vis. Sci. 1996, 37: 855-868; Chen et al. J. Mal. Biol. 1999, 293: 865-881; Krzystolik et al. Arch. Ophthalmol. 2002, 120: 338-346), thyroid hyperplasias (including Grave's disease), corneal and other tissue transplantation, allograft rejection (Reinders et al. J. Clin. Invest. 2003, 112: 1655-1665), various inflammatory disorders (Dvorak J. Clin. Oncol. 2002, 20: 4368-4380), chronic inflammation, lung inflammation, nephrotic syndrome, preeclampsia (Maynard et al. J. Clin. Invest. 2003, 111: 649-658; Hoeben et al. Pharmacol. Rev. 2004, 56: 549-579), ovarian hyperstimulation syndrome (OHSS) (McClure et al. Lancet 1994, 344: 235-269; Lee et al. Fertil. Steril. 1997, 68: 305-311; Levin et al. J. Clin. Invest. 1998, 102: 1978-1985; Artini et al. Fertil. Steril. 1998, 70: 560-565; Ferrara et al. Nat. Med. 1998, 4: 336-340), polycystic ovary syndrome (PCOS) (Agrawal et al. Hum. Reprod. 1998, 13: 651-655), ascites, pericardial effusion (such as that associated with pericarditis), and pleural effusion; edema (Kovacs et al. Stroke 1996, 27: 1865-1872; Hayashi et al. Stroke 1997, 28: 2039-2044; Lennmyr et at J. Neuropathol Exp. Neurol. 1998, 57: 874-882), including without being limiting central nervous system (CNS) edema, cerebral edema, spinal cord or spinal canal edema or other conditions leading to increased intracranial pressure (such as local spinal cord injury), vasogenic edema and cytotoxic edema, edema resulting from or accompanied by a variety of pathological conditions or stimuli, including but not limited to, acute hypertension, meningitis, encephalitis, abscess, neoplastic diseases (such as described above) (particularly solid tumors), trauma (such as head injury), hemorrhage, viral infection, cerebral malaria, stroke, radiation, multiple sclerosis, post cardiac arrest, birth asphyxia, glutamate toxicity, encephalopathy, hypoxia, ischemia and renal dialysis.

[0026] VEGF agonist can be used, for example, in cardiovascular ischemia (Hoeben et al. Pharmacol. Rev. 2004, 56: 549-579); peripheral vascular disease such as critical limb ischemia (Baumgartner et al. Circulation 1998, 97: 1114-1123), thrombangitis obliterans (Isner et al. I. Vase. Surg. 1998, 28: 964-973), ischemic vascular occlusion (Mack et al. I. Vase. Surg. 1998, 27: 699-709), peripheral artherial occlusion (PAO) and revascularization ischemic heart tissue.

[0027] In particular, the polypeptides and compositions of the present invention can be used for the prevention and treatment of conditions and diseases characterized by excessive and/or pathological angiogenesis or neovascularization which are caused by excessive and/or unwanted signaling mediated by VEGF or by the pathway(s) in which VEGF is involved. Examples of such conditions and diseases characterized by excessive and/or pathological angiogenesis or neovascularization will again be clear to the skilled person based on the disclosure herein.

[0028] Thus, without being limited thereto, the amino acid sequences and polypeptides of the invention can for example be used to prevent and/or to treat all diseases and disorders that are currently being prevented or treated with active principles that can modulate VEGF-mediated signalling, such as those mentioned in the prior art cited above. It is also envisaged that the polypeptides of the invention can be used to prevent and/or to treat all diseases and disorders for which treatment with such active principles is currently being developed, has been proposed, or will be proposed or developed in future. In addition, it is envisaged that, because of their favourable properties as further described herein, the polypeptides of the present invention may be used for the prevention and treatment of other diseases and disorders than those for which these known active principles are being used or will be proposed or developed; and/or that the polypeptides of the present invention may provide new methods and regimens for treating the diseases and disorders described herein.

[0029] Other applications and uses of the amino acid sequences and polypeptides of the invention will become clear to the skilled person from the further disclosure herein.

[0030] Generally, it is an object of the invention to provide pharmacologically active agents, as well as compositions comprising the same, that can be used in the diagnosis, prevention and/or treatment of conditions and diseases characterized by excessive and/or pathological angiogenesis or neovascularization and of the further diseases and disorders mentioned herein; and to provide methods for the diagnosis, prevention and/or treatment of such diseases and disorders that involve the administration and/or use of such agents and compositions.

[0031] In particular, it is an object of the invention to provide such pharmacologically active agents, compositions and/or methods that have certain advantages compared to the agents, compositions and/or methods that are currently used and/or known in the art. These advantages will become clear from the further description below.

[0032] More in particular, it is an object of the invention to provide therapeutic proteins that can be used as pharmacologically active agents, as well as compositions comprising the same, for the diagnosis, prevention and/or treatment of conditions and diseases characterized by excessive and/or pathological angiogenesis or neovascularization and of the further diseases and disorders mentioned herein; and to provide methods for the diagnosis, prevention and/or treatment of such diseases and disorders that involve the administration and/or the use of such therapeutic proteins and compositions.

[0033] Accordingly, it is a specific object of the present invention to provide amino acid sequences that are directed against (as defined herein) VEGF, in particular against VEGF from a warm-blooded animal, more in particular against VEGF from a mammal, and especially against human VEGF; and to provide proteins and polypeptides comprising or essentially consisting of at least one such amino acid sequence.

[0034] In particular, it is a specific object of the present invention to provide such amino acid sequences and such proteins and/or polypeptides that are suitable for prophylactic, therapeutic and/or diagnostic use in a warm-blooded animal, and in particular in a mammal, and more in particular in a human being.

[0035] More in particular, it is a specific object of the present invention to provide such amino acid sequences and such proteins and/or polypeptides that can be used for the prevention, treatment, alleviation and/or diagnosis of one or more diseases, disorders or conditions associated with VEGF and/or mediated by VEGF (such as the diseases, disorders and conditions mentioned herein) in a warm-blooded animal, in particular in a mammal, and more in particular in a human being.

[0036] It is also a specific object of the invention to provide such amino acid sequences and such proteins and/or polypeptides that can be used in the preparation of pharmaceutical or veterinary compositions for the prevention and/or treatment of one or more diseases, disorders or conditions associated with and/or mediated by VEGF (such as the diseases, disorders and conditions mentioned herein) in a warm-blooded animal, in particular in a mammal, and more in particular in a human being.

[0037] In the invention, generally, these objects are achieved by the use of the amino acid sequences, proteins, polypeptides and compositions that are described herein.

[0038] In general, the invention provides amino acid sequences that are directed against (as defined herein) and/or can specifically bind (as defined herein) to VEGF; as well as compounds and constructs, and in particular proteins and polypeptides, that comprise at least one such amino acid sequence.

[0039] More in particular, the invention provides amino acid sequences that can bind to VEGF with an affinity (suitably measured and/or expressed as a K_{D}-value (actual or apparent), a K_{A}-value (actual or apparent), a kₒₙ-rate and/or a k_{off}-rate, or alternatively as an IC₅₀ value, as further described herein) that is as defined herein; as well as compounds and constructs, and in particular proteins and polypeptides, that comprise at least one such amino acid sequence. In particular, amino acid sequences and polypeptides of the invention are preferably such that they:
[0040] bind to VEGF with a dissociation constant (K_{D}) of 10⁻⁵ to 10⁻¹² moles/liter or less, and preferably 10⁻⁷ to 10⁻¹² moles/liter or less and more preferably 10⁻⁸ to 10⁻¹² moles/liter (i.e. with an association constant (K_{A}) of 10⁵ to 10¹² liter/moles or more, and preferably 10⁷ to 10¹² liter/moles or more and more preferably 10⁸ to 10¹² liter/moles);
   and/or such that they:
[0041] bind to VEGF with a kₒₙ-rate of between 10² M⁻¹s⁻¹ to about 10⁷ M⁻¹s⁻¹, preferably between 10³ M⁻¹s⁻¹ and 10⁷ M⁻¹s⁻¹, more preferably between 10⁴ M⁻¹¹s⁻¹ and 10⁷ M⁻¹s⁻¹, such as between 10⁵ M⁻¹s⁻¹ and 10⁷ M⁻¹s⁻¹;
   and/or such that they:
[0042] bind to VEGF with a k_{off} rate between 1 s⁻¹ (t_{1/2}=0.69 s) and 10⁻⁶ s⁻¹ (providing a near irreversible complex with a t_{1/2} of multiple days), preferably between 10⁻² s⁻¹ and 10⁻⁶ s⁻¹, more preferably between 10⁻³ s⁻¹ and 10⁻⁶ s⁻¹, such as between 10⁻⁴ s⁻¹ and 10⁻⁶ s⁻¹.

[0043] Preferably, a monovalent amino acid sequence of the invention (or a polypeptide that contains only one amino acid sequence of the invention) is preferably such that it will bind to VEGF with an affinity less than 500 nM, preferably less than 200 nM, more preferably less than 10 nM, such as less than 500 pM.

[0044] Some preferred 1050 values for binding of the amino acid sequences or polypeptides of the invention to VEGF will become clear from the further description and examples herein.

[0045] For binding to VEGF, an amino acid sequence of the invention will usually contain within its amino acid sequence one or more amino acid residues or one or more stretches of amino acid residues (i.e. with each “stretch” comprising two or amino acid residues that are adjacent to each other or in close proximity to each other, i.e. in the primary or tertiary structure of the amino acid sequence) via which the amino acid sequence of the invention can bind to VEGF, which amino acid residues or stretches of amino acid residues thus form the “site” for binding to VEGF (also referred to herein as the “antigen binding site”).

[0046] The amino acid sequences provided by the invention are preferably in essentially isolated form (as defined herein), or form part of a protein or polypeptide of the invention (as defined herein), which may comprise or essentially consist of one or more amino acid sequences of the invention and which may optionally further comprise one or more further amino acid sequences (all optionally linked via one or more suitable linkers). For example, and without limitation, the one or more amino acid sequences of the invention may be used as a binding unit in such a protein or polypeptide, which may optionally contain one or more further amino acid sequences that can serve as a binding unit (i.e. against one or more other targets than VEGF), so as to provide a monovalent, multivalent or multispecific polypeptide of the invention, respectively, all as described herein. Such a protein or polypeptide may also be in essentially isolated form (as defined herein).

[0047] The amino acid sequences and polypeptides of the invention as such preferably essentially consist of a single amino acid chain that is not linked via disulphide bridges to any other amino acid sequence or chain (but that may or may not contain one or more intramolecular disulphide bridges. For example, it is known that Nanobodies—as described herein—may sometimes contain a disulphide bridge between CDR3 and CDR1 or FR2).

[0048] However, it should be noted that one or more amino acid sequences of the invention may be linked to each other and/or to other amino acid sequences (e.g. via disulphide bridges) to provide peptide constructs that may also be useful in the invention (for example Fab′ fragments, F(ab′)₂ fragments, ScFv constructs, “diabodies” and other multispecific constructs. Reference is for example made to the review by Holliger and Hudson, Nat. Biotechnol. 2005 September; 23(9):1126-36).

[0049] Generally, when an amino acid sequence of the invention (or a compound, construct or polypeptide comprising the same) is intended for administration to a subject (for example for therapeutic and/or diagnostic purposes as described herein), it is preferably either an amino acid sequence that does not occur naturally in said subject; or, when it does occur naturally in said subject, in essentially isolated form (as defined herein).

[0050] It will also be clear to the skilled person that for pharmaceutical use, the amino acid sequences of the invention (as well as compounds, constructs and polypeptides comprising the same) are preferably directed against human VEGF; whereas for veterinary purposes, the amino acid sequences and polypeptides of the invention are preferably directed against VEGF from the species to be treated, or at least cross-reactive with VEGF from the species to be treated.

[0051] Furthermore, an amino acid sequence of the invention may optionally, and in addition to the at least one binding site for binding against VEGF, contain one or more further binding sites for binding against other antigens, proteins or targets.

[0052] The efficacy of the amino acid sequences and polypeptides of the invention, and of compositions comprising the same, can be tested using any suitable in vitro assay, cell-based assay, in vivo assay and/or animal model known per se, or any combination thereof, depending on the specific disease or disorder involved. Suitable assays and animal models will be clear to the skilled person, and for example include ELISA; solid phase receptor binding and blocking assays, alphasereen assay (Perkin Elmer, Minn., US); Biaeore (BIAcore AB Corporation, Uppsala, Sweden); cell proliferation assays such as for example described in Winkles et al. (Proc. Natl. Acad. Sci USA 1987, 84: 7124-7128), Miao et al. (2006, Biochem. Biophys. Res. Commun. 345: 438-445), Jo et al. (Am. J. Pathol. 2006, 168: 2036-2053) and Wu et al. (Clin. Cancer Res. 2006, 12: 6573-6584); VEGF-induced chemotaxis assays such as for example described in WO 94/10202, WO 00/37502 and Miao et al. (2006, Biochem. Biophys. Res. Commun. 345: 438-445); in vitro and in vivo angiogenesis assays such as for example the chicken chorio allantorc membrane (CAM) assay and other angiogenesis assays as described in Hasan et al. (Angiogenesis 2004, 7: 1-16); Xenograft mouse models such as for example described in WO 94/10202, WO 00/37502, Presta et al. (Cancer Res. 1997, 57: 4593-4599) and Wu et al. (Clin. Cancer Res. 2006, 12: 6573-6584); ischemic mouse retina models such as for example described in Duh and Aiello (Diabetes 1999, 48: 1899-1906); animal models for ischemic-retinopathy such as for example described in Aiello et al. (Proc. Natl. Acad. Sci. USA 1995, 92: 10457-10461); primate models of AMD such as for example described in Krzystolik et al. (Arch. Ophthalmol. 2002, 120: 338-346); primate models of ischemic iris neovascularization; corneal neovascularization models such as for example described in Joussen et al. {Invest. Ophthalmol. Vis. Sci. 2003, 44: 117-123) and Jo et al. (Am. J. Pathol. 2006, 168: 2036-2053); choroidal neovascularization (CNV) models such as for example described in Mori et al. (Am. J. Pathol. 2001, 159: 313-320) and Jo et al. (Am. J. Pathol. 2006, 168: 2036-2053); cerebral edema models such as for example described in WO 00/37502, as well as the assays and animal models used in the experimental part below and in the prior art cited herein.

[0053] In Biacore, the K_{D} for the Nanobodies VEGF165 binding is preferably such as between 1 pM and 100 nM, preferably between 1 pM and 10 nM, more preferably between 1 pM and 1 nM, such as between 1 pM and 100 pM.

[0054] In an alphascreen assay (as described in the Example section), the IC₅₀ for the Nanobodies in inhibiting the VEGF/VEGFR interaction is preferably such as between 1 pM and 100 nM, preferably between 1 pM and 10 nM, more preferably between 1 pM and 1 nM, such as between 1 pM and 1.00 pM.

[0055] In an HUVEC cell proliferation assay {as described in the Example section), the IC₅₀ for the Nanobodies in inhibiting the VEGF stimulated proliferation is preferably such as between 0.1 pM and 10 nM, preferably between 0.1 pM and 1 nM, more preferably between 0.1 pM and 200 pM, such as between 0.1 pM and 20 pM.

[0056] Also, according to the invention, amino acid sequences and polypeptides that are directed against VEGF from a first species of warm-blooded animal may or may not show cross-reactivity with VEGF from one or more other species of warm-blooded animal. For example, amino acid sequences and polypeptides directed against human VEGF may or may not show cross reactivity with VEGF from one or more other species of primates (such as, without limitation, monkeys from the genus Macaca (such as, and in particular, cynomologus monkeys (Macaca fascicularis) and/or rhesus monkeys (Macaca mulatta)) and baboon (Papio ursinus)) and/or with VEGF from one or more species of animals that are often used in animal models for diseases {for example mouse, rat, rabbit, pig or dog), and in particular in animal models for diseases and disorders associated with VEGF (such as the species and animal models mentioned herein). In this respect, it will be clear to the skilled person that such cross-reactivity, when present, may have advantages from a drug development point of view, since it allows the amino acid sequences and polypeptides against human VEGF to be tested in such disease models.

[0057] More generally, amino acid sequences and polypeptides of the invention that are cross-reactive with VEGF from multiple species of mammal will usually be advantageous for use in veterinary applications, since it will allow the same amino acid sequence or polypeptide to be used across multiple species. Thus, it is also encompassed within the scope of the invention that amino acid sequences and polypeptides directed against VEGF from one species of animal (such as amino acid sequences and polypeptides against human VEGF) can be used in the treatment of another species of animal, as long as the use of the amino acid sequences and/or polypeptides provide the desired effects in the species to be treated. The amino acid sequences and polypeptides of the invention may bind, in addition to

[0058] VEGF-A, other members of the VEGF family. Preferably, the amino acid sequences and polypeptides of the invention bind to VEGF-A while not interacting with other members of the VEGF family

[0059] The amino acid sequences and polypeptides of the invention bind at least one isoform of VEGF (i.e. VEGF110, VEGF121, VEGF145, VEGF165, VEGF183, VEGF189 and/or VEGF206). In a preferred aspect, the amino acid sequences and polypeptides of the invention bind at least two isoforms, at least three isoforms, at least four isoforms, at least five isoforms and, preferably, all isoforms of VEGF. In another preferred aspect, the amino acid sequences and polypeptides of the invention may bind 1 isoforms of VEGF (such as e.g. VEGF121, VEGF 145 or VEGF 165), two isoforms (such as e.g. VEGF121 and VEGF145; or VEGF 145 and VEGF 165; or VEGF121 and VEGF 165), three isoforms {such as e.g. VEGF 121, VEGF145 and VEGF165; or VEGF 145, VEGF189 and VEGF 206; or VEGF121, VEGF165 and VEGF183), four isoforms (such as e.g. VEGF 110, VEGF121, VEGF165 and VEGF183; or VEGF110, VEGF121, VEGF145 and VEGF165), five isoforms (such as e.g. VEGF121, VEGF145, VEGF165, VEGF183 and VEGF186; or VEGF121, VEGF145, VEGF165, VEGF183 and VEGF206) or six isoforms (such as e.g. VEGF121, VEGF145, VEGF165, VEGF183, VEGF189 and/or VEGF206). In one aspect of the invention, the amino acid sequences and polypeptides of the invention may e.g. bind all soluble isoforms while not interacting with the heparing-bound isoforms; or the amino acid sequences and polypeptides of the invention may bind all heparin-bound isoforms while not interacting with the soluble isoforms.

[0060] The present invention is in its broadest sense also not particularly limited to or defined by a specific antigenic determinant, epitope, part, domain, subunit or confirmation (where applicable) of VEGF against which the amino acid sequences and polypeptides of the invention are directed. For example, the amino acid sequences and polypeptides may or may not be directed against an “interaction site” (as defined herein). However, it is generally assumed and preferred that the amino acid sequences and polypeptides of the invention are preferably directed against the VEGF binding site of the VEGF receptor (Keyt et al. J. Biol. Chem. 1996, 274: 5638-5646), or otherwise capable of interfering with VEGF binding to the VEGF receptor, such as by sterically hindering VEGF access to the VEGF receptor. Thus, in one preferred, but non-limiting aspect, the amino acid sequences and polypeptides of the invention are directed against the binding site for VEGFR-1 and/or the binding site for VEGFR-2, and are as further defined herein. In one preferred, but non-limiting aspect, the amino acid sequences and polypeptides of the invention interact with at least one amino acid that makes up the binding site on VEGF for VEGFR-1 and/or VEGFR-2.

[0061] In one aspect of the invention, the amino acid sequences and polypeptides of the invention inhibit binding of VEGF to VEGFR-1, without inhibiting binding of VEGF to VEGFR-2. In another aspect of the invention, the amino acid sequences and polypeptides of the invention inhibit binding of VEGF to VEGFR-2, without inhibiting binding of VEGF to VEGFR-1. In yet another aspect of the invention, the amino acid sequences and polypeptides of the invention inhibit binding of VEGF to VEGFR-1 and binding of VEGF to VEGFR-2.

[0062] As further described herein, a polypeptide of the invention may contain two or more amino acid sequences of the invention that are directed against VEGF. Generally, such polypeptides will bind to VEGF with increased avidity compared to a single amino acid sequence of the invention. Such a polypeptide may for example comprise two amino acid sequences of the invention that are directed against the same antigenic determinant, epitope, part, domain, subunit or confirmation (where applicable) of VEGF (which may or may not be an interaction site); or comprise at least one “first” amino acid sequence of the invention that is directed against a first antigenic determinant, epitope, part, domain, subunit or confirmation (where applicable) of VEGF (which may or may not be an interaction site); and at least one “second” amino acid sequence of the invention that is directed against a second antigenic determinant, epitope, part, domain, subunit or confirmation (where applicable) different from the first (and which again may or may not be an interaction site). Preferably, in such “biparatopic” polypeptides of the invention, at least one amino acid sequence of the invention is directed against an interaction site (as defined herein), although the invention in its broadest sense is not limited thereto.

[0063] Also, when the target is part of a binding pair (for example, a receptor-ligand binding pair), the amino acid sequences and polypeptides may be such that they compete with the cognate binding partner (e.g. the ligand, receptor or other binding partner, as applicable) for binding to the target, and/or such that they (fully or partially) neutralize binding of the binding partner to the target.

[0064] It is also within the scope of the invention that, where applicable, an amino acid sequence of the invention can bind to two or more antigenic determinants, epitopes, parts, domains, subunits or confirmations of VEGF. In such a case, the antigenic determinants, epitopes, parts, domains or subunits of VEGF to which the amino acid sequences and/or polypeptides of the invention bind may be essentially the same (for example, if VEGF contains repeated structural motifs or occurs in a dimeric/multimeric form) or may be different (and in the latter case, the amino acid sequences and polypeptides of the invention may bind to such different antigenic determinants, epitopes, parts, domains, subunits of VEGF with an affinity and/or specificity which may be the same or different). Also, for example, when VEGF exists in an activated conformation and in an inactive conformation, the amino acid sequences and polypeptides of the invention may bind to either one of these confirmation, or may bind to both these confirmations (i.e. with an affinity and/or specificity which may be the same or different). Also, for example, the amino acid sequences and polypeptides of the invention may bind to a conformation of VEGF in which it is bound to a pertinent ligand (or to the extracellular matrix such as to cell surface heparin-containing proteoglycans in the extracellular matrix), may bind to a conformation of VEGF in which it not bound to a pertinent ligand (such as a conformation in which it is soluble), or may bind to both such conformations (again with an affinity and/or specificity which may be the same or different).

[0065] It is also expected that the amino acid sequences and polypeptides of the invention will generally bind to all naturally occurring or synthetic analogs, variants, mutants, alleles, parts and fragments of VEGF; or at least to those analogs, variants, mutants, alleles, parts and fragments of VEGF that contain one or more antigenic determinants or epitopes that are essentially the same as the antigenic determinant(s) or epitope(s) to which the amino acid sequences and polypeptides of the invention bind in VEGF (e.g. in wild-type VEGF). Again, in such a case, the amino acid sequences and polypeptides of the invention may bind to such analogs, variants, mutants, alleles, parts and fragments with an affinity and/or specificity that are the same as, or that are different from (i.e. higher than or lower than), the affinity and specificity with which the amino acid sequences of the invention bind to (wild-type) VEGF. It is also included within the scope of the invention that the amino acid sequences and polypeptides of the invention bind to some analogs, variants, mutants, alleles, parts and fragments of VEGF, but not to others.

[0066] When VEGF exists in a monomeric form and in one or more multimeric forms (such as its dimeric form), it is within the scope of the invention that the amino acid sequences and polypeptides of the invention only bind to VEGF in monomeric form, only bind to VEGF in multimeric form, or bind to both the monomeric and the multimeric form. Again, in such a case, the amino acid sequences and polypeptides of the invention may bind to the monomeric form with an affinity and/or specificity that are the same as, or that are different from (i.e. higher than or lower than), the affinity and specificity with which the amino acid sequences of the invention bind to the multimeric form.

[0067] Also, when VEGF can associate with other proteins or polypeptides to form protein complexes (e.g. with multiple subunits), it is within the scope of the invention that the amino acid sequences and polypeptides of the invention bind to VEGF in its non-associated state, hind to VEGF in its associated state, or bind to both. In all these cases, the amino acid sequences and polypeptides of the invention may bind to such multimers or associated protein complexes with an affinity and/or specificity that may be the same as or different from (i.e. higher than or lower than) the affinity and/or specificity with which the amino acid sequences and polypeptides of the invention bind to VEGF in its monomeric and non-associated state.

[0068] Also, as will be clear to the skilled person, proteins or polypeptides that contain two or more amino acid sequences directed against VEGF may bind with higher avidity to VEGF than the corresponding monomeric amino acid sequence(s). For example, and without limitation, proteins or polypeptides that contain two or more amino acid sequences directed against different epitopes of VEGF may (and usually will) bind with higher avidity than each of the different monomers, and proteins or polypeptides that contain two or more amino acid sequences directed against VEGF may (and usually will) bind also with higher avidity to a multimer (such as its dimer) of VEGF. In one aspect of the invention, the proteins or polypeptides of the invention contain two amino acid sequences each directed against a different VEGF receptor binding site, i.e. against the binding site for VEGFR-1 and against the binding site for VEGFR-2.

[0069] Generally, amino acid sequences and polypeptides of the invention will at least bind to those forms of VEGF (including monomeric, multimeric and associated forms) that are the most relevant from a biological and/or therapeutic point of view, as will be clear to the skilled person.

[0070] It is also within the scope of the invention to use parts, fragments, analogs, mutants, variants, alleles and/or derivatives of the amino acid sequences and polypeptides of the invention, and/or to use proteins or polypeptides comprising or essentially consisting of one or more of such parts, fragments, analogs, mutants, variants, alleles and/or derivatives, as long as these are suitable for the uses envisaged herein. Such parts, fragments, analogs, mutants, variants, alleles and/or derivatives will usually contain (at least part of) a functional antigen-binding site for binding against VEGF; and more preferably will be capable of specific binding to VEGF, and even more preferably capable of binding to VEGF with an affinity (suitably measured and/or expressed as a K_{D}-value (actual or apparent), a K_{A}-value (actual or apparent), a kₒₙ-rate and/or a k_{off}-rate, or alternatively as an IC₅₀ value, as further described herein) that is as defined herein. Some non-limiting examples of such parts, fragments, analogs, mutants, variants, alleles, derivatives, proteins and/or polypeptides will become clear from the further description herein. Additional fragments or polypeptides of the invention may also be provided by suitably combining (i.e. by linking or genetic fusion) one or more (smaller) parts or fragments as described herein.

[0071] In one specific, but non-limiting aspect of the invention, which will be further described herein, such analogs, mutants, variants, alleles, derivatives have an increased half-life in serum (as further described herein) compared to the amino acid sequence from which they have been derived. For example, an amino acid sequence of the invention may be linked (chemically or otherwise) to one or more groups or moieties that extend the half-life (such as PEG), so as to provide a derivative of an amino acid sequence of the invention with increased half-life.

[0072] In one specific, but non-limiting aspect, the amino acid sequence of the invention may be an amino acid sequence that comprises an immunoglobulin fold or may be an amino acid sequence that, under suitable conditions (such as physiological conditions) is capable of forming an immunoglobulin fold (i.e. by folding). Reference is inter alia made to the review by Halaby et al. (J. Protein Eng. 1999, 12: 563-71). Preferably, when properly folded so as to form an immunoglobulin fold, such an amino acid sequence is capable of specific binding (as defined herein) to VEGF; and more preferably capable of binding to VEGF with an affinity (suitably measured and/or expressed as a K_{D}-value (actual or apparent), a K_{A}-value (actual or apparent), a kₒₙ-rate and/or a k_{off}-rate, or alternatively as an IC₅₀ value, as further described herein) that is as defined herein. Also, parts, fragments, analogs, mutants, variants, alleles and/or derivatives of such amino acid sequences are preferably such that they comprise an immunoglobulin fold or are capable for forming, under suitable conditions, an immunoglobulin fold.

[0073] In particular, but without limitation, the amino acid sequences of the invention may be amino acid sequences that essentially consist of 4 framework regions (FR1 to FR4 respectively) and 3 complementarity determining regions (CDR1 to CDR3 respectively); or any suitable fragment of such an amino acid sequence (which will then usually contain at least some of the amino acid residues that form at least one of the CDR's, as further described herein).

[0074] The amino acid sequences of the invention may in particular be an immunoglobulin sequence or a suitable fragment thereof, and more in particular be an immunoglobulin variable domain sequence or a suitable fragment thereof, such as light chain variable domain sequence (e.g. a V_{L}-sequence) or a suitable fragment thereof; or a heavy chain variable domain sequence (e.g. a V_{H}-sequence) or a suitable fragment thereof. When the amino acid sequence of the invention is a heavy chain variable domain sequence, it may be a heavy chain variable domain sequence that is derived from a conventional four-chain antibody (such as, without limitation, a V_{H} sequence that is derived from a human antibody) or be a so-called V_{HH}-sequence (as defined herein) that is derived from a so-called “heavy chain antibody” (as defined herein).

[0075] However, it should be noted that the invention is not limited as to the origin of the amino acid sequence of the invention (or of the nucleotide sequence of the invention used to express it), nor as to the way that the amino acid sequence or nucleotide sequence of the invention is (or has been) generated or obtained. Thus, the amino acid sequences of the invention may be naturally occurring amino acid sequences (from any suitable species) or synthetic or semi-synthetic amino acid sequences. In a specific but non-limiting aspect of the invention, the amino acid sequence is a naturally occurring immunoglobulin sequence (from any suitable species) or a synthetic or semi-synthetic immunoglobulin sequence, including but not limited to “humanized” (as defined herein) immunoglobulin sequences (such as partially or fully humanized mouse or rabbit immunoglobulin sequences, and in particular partially or fully humanized V_{HH} sequences or Nanobodies), “camelized” (as defined herein) immunoglobulin sequences, as well as immunoglobulin sequences that have been obtained by techniques such as affinity maturation (for example, starting from synthetic, random or naturally occurring immunoglobulin sequences), CDR grafting, veneering, combining fragments derived from different immunoglobulin sequences, PCR assembly using overlapping primers, and similar techniques for engineering immunoglobulin sequences well known to the skilled person; or any suitable combination of any of the foregoing. Reference is for example made to the standard handbooks, as well as to the further description and prior art mentioned herein.

[0076] Similarly, the nucleotide sequences of the invention may be naturally occurring nucleotide sequences or synthetic or semi-synthetic sequences, and may for example be sequences that are isolated by PCR from a suitable naturally occurring template (e.g. DNA or RNA isolated from a cell), nucleotide sequences that have been isolated from a library (and in particular, an expression library), nucleotide sequences that have been prepared by introducing mutations into a naturally occurring nucleotide sequence (using any suitable technique known per se, such as mismatch PCR), nucleotide sequence that have been prepared by PCR using overlapping primers, or nucleotide sequences that have been prepared using techniques for DNA synthesis known per se.

[0077] The amino acid sequence of the invention may in particular be a domain antibody (or an amino acid sequence that is suitable for use as a domain antibody), a single domain antibody (or an amino acid sequence that is suitable for use as a single domain antibody), a “dAb” (or an amino acid sequence that is suitable for use as a dAb) or a Nanobody® (as defined herein, and including but not limited to a V_{HH} sequence); other single variable domains, or any suitable fragment of any one thereof. For a general description of (single) domain antibodies, reference is also made to the prior art cited above, as well as to EP 0 368 684. For the term “dAb's”, reference is for example made to Ward et al. (Nature 1989 Oct. 12; 341 (6242): 544-6), to Holt et al., Trends Biotechnol., 2003, 21(10:484-490; as well as to for example WO 06/030220, WO 06/003388 and other published patent applications of Domantis Ltd. It should also be noted that, although less preferred in the context of the present invention because they are not of mammalian origin, single domain antibodies or single variable domains can be derived from certain species of shark (for example, the so-called “IgNAR domains”, see for example WO 05/18629).

[0078] In particular, the amino acid sequence of the invention may be a Nanobody® (as defined herein) or a suitable fragment thereof. [Note: Nanobody®, Nanohodies™ and Nanoclone® are regisered trademarks of Ablynx N.V.] Such Nanobodies directed against VEGF will also be referred to herein as “Nanobodies of the invention”.

[0079] For a general description of Nanobodies, reference is made to the further description below, as well as to the prior art cited herein. In this respect, it should however be noted that this description and the prior art mainly described Nanobodies of the so-called “V_{H}3 class” (i.e. Nanobodies with a high degree of sequence homology to human germline sequences of the V_{H}3 class such as DP-47, DP-51 or DP-29), which Nanobodies form a preferred aspect of this invention. It should however be noted that the invention in its broadest sense generally covers any type of Nanobody directed against VEGF, and for example also covers the

[0080] Nanobodies belonging to the so-called “V_{H}4 class” (i.e. Nanobodies with a high degree of sequence homology to human germline sequences of the V_{H}4 class such as DP-78), as for example described in the U.S. provisional application 60/792,279 by Ablynx N.V. entitled “DP-78-like Nanobodies” filed on Apr. 14, 2006 (see also PCT/EP2007/003259).

[0081] Generally, Nanobodies (in particular V_{HH} sequences and partially humanized Nanobodies) can in particular be characterized by the presence of one or more “Hallmark residues” (as described herein) in one or more of the framework sequences (again as further described herein).

[0082] Thus, generally, a Nanobody can be defined as an amino acid sequence with the (general) structure
[0083] FR1-CDR1-FR2-CDR2-FR3-CDR3-FR4
   in which FR1 to FR4 refer to framework regions 1 to 4, respectively, and in which CDR1 to CDR3 refer to the complementarity determining regions 1 to 3, respectively, and in which one or more of the Hallmark residues are as further defined herein.

[0084] In particular, a Nanobody can be an amino acid sequence with the (general) structure
[0085] PR1-CDR1-FR2-CDR2-FR3-CDR3-FR4
   in which FR1 to FR4 refer to framework regions 1 to 4, respectively, and in which CDR1 to CDR3 refer to the complementarity determining regions 1 to 3, respectively, and in which the framework sequences are as further defined herein.

[0086] More in particular, a Nanobody can be an amino acid sequence with the (general) structure
[0087] FR1-CDR1-FR2-CDR2-FR3-CDR3-FR4
   in which FR1 to FR4 refer to framework regions 1 to 4, respectively, and in which CDR1 to CDR3 refer to the complementarity determining regions 1 to 3, respectively, and in which:
[0088] i) preferably one or more of the amino acid residues at positions 11, 37, 44, 45, 47, 83, 84, 103, 104 and 108 according to the Kabat numbering are chosen from the Hallmark residues mentioned in Table A-3 below;
   and in which:
[0089] ii) said amino acid sequence has at least 80% amino acid identity with at least one of the amino acid sequences of SEQ ID NO's: 1 to 22, in which for the purposes of determining the degree of amino acid identity, the amino acid residues that form the CDR sequences (indicated with X in the sequences of SEQ ID NO's: 1 to 22) are disregarded.

[0090] In these Nanobodies, the CDR sequences are generally as further defined herein.

[0091] Thus, the invention also relates to such Nanobodies that can bind to (as defined herein) and/or are directed against VEGF, to suitable fragments thereof, as well as to polypeptides that comprise or essentially consist of one or more of such Nanobodies and/or suitable fragments.

[0092] SEQ ID NO's: 486-575 give the amino acid sequences of a number of V_{HH} sequences that have been raised against VEGF.

[0093] In particular, the invention in some specific aspects provides:
[0094] amino acid sequences that are directed against (as defined herein) VEGF and that have at least 80%, preferably at least 85%, such as 90% or 95% or more sequence identity with at least one of the amino acid sequences of SEQ ID NO's: 441-485. These amino acid sequences may further be such that they neutralize binding of the cognate ligand to VEGF; and/or compete with the cognate ligand for binding to VEGF; and/or are directed against an interaction site (as defined herein) on VEGF (such as the ligand binding site);
[0095] amino acid sequences that cross-block (as defined herein) the binding of at least one of the amino acid sequences of SEQ ID NO's: 441-485 to VEGF and/or that compete with at least one of the amino acid sequences of SEQ ID NO's: 441-485 for binding to VEGF. Again, these amino acid sequences may further be such that they neutralize binding of the cognate ligand to VEGF; and/or compete with the cognate ligand for binding to VEGF; and/or are directed against an interaction site (as defined herein) on VEGF (such as the ligand binding site);
   which amino acid sequences may be as further described herein (and may for example be Nanobodies); as well as polypeptides of the invention that comprise one or more of such amino acid sequences (which may be as further described herein, and may for example be bispecific and/or biparatopic polypeptides as described herein), and nucleic acid sequences that encode such amino acid sequences and polypeptides. Such amino acid sequences and polypeptides do not include any naturally occurring ligands.

[0096] Accordingly, some particularly preferred Nanobodies of the invention are Nanobodies which can bind (as further defined herein) to and/or are directed against to VEGF and which:
[0097] i) have at least 80% amino acid identity with at least one of the amino acid sequences of SEQ ID NO's: 441-485, in which for the purposes of determining the degree of amino acid identity, the amino acid residues that form the CDR sequences are disregarded. In this respect, reference is also made to Table A-1, which lists the framework 1 sequences (SEQ ID NO's: 126-170), framework 2 sequences (SEQ ID NO's: 216-260), framework 3 sequences (SEQ ID NO's: 306-350) and framework 4 sequences (SEQ ID NO's: 396-440) of the Nanobodies of SEQ ID NO's: 441-485 (with respect to the amino acid residues at positions 1 to 4 and 27 to 30 of the framework 1 sequences, reference is also made to the comments made below. Thus, for determining the degree of amino acid identity, these residues are preferably disregarded);
   and in which:
[0098] ii) preferably one or more of the amino acid residues at positions 11, 37, 44, 45, 47, 83, 84, 103, 104 and 108 according to the Kabat numbering are chosen from the Hallmark residues mentioned in Table A-3 below.

[0099] In these Nanobodies, the CDR sequences are generally as further defined herein.

[0100] Again, such Nanobodies may be derived in any suitable manner and from any suitable source, and may for example be naturally occurring V_{HH} sequences (i.e. from a suitable species of Camelid) or synthetic or semi-synthetic amino acid sequences, including but not limited to “humanized” (as defined herein) Nanobodies, “camelized” (as defined herein) immunoglobulin sequences (and in particular camelized heavy chain variable domain sequences), as well as Nanobodies that have been obtained by techniques such as affinity maturation (for example, starting from synthetic, random or naturally occurring immunoglobulin sequences), CDR grafting, veneering, combining fragments derived from different immunoglobulin sequences, PCR assembly using overlapping primers, and similar techniques for engineering immunoglobulin sequences well known to the skilled person; or any suitable combination of any of the foregoing as further described herein. Also, when a Nanobody comprises a V_{HH} sequence, said Nanobody may be suitably humanized, as further described herein, so as to provide one or more further (partially or fully) humanized Nanobodies of the invention. Similarly, when a Nanobody comprises a synthetic or semi-synthetic sequence (such as a partially humanized sequence), said Nanobody may optionally be further suitably humanized, again as described herein, again so as to provide one or more further (partially or fully) humanized Nanobodies of the invention.

[0101] In particular, humanized Nanobodies may be amino acid sequences that are as generally defined for Nanobodies in the previous paragraphs, but in which at least one amino acid residue is present (and in particular, in at least one of the framework residues) that is and/or that corresponds to a humanizing substitution (as defined herein). Some preferred, but non-limiting humanizing substitutions (and suitable combinations thereof) will become clear to the skilled person based on the disclosure herein. In addition, or alternatively, other potentially useful humanizing substitutions can be ascertained by comparing the sequence of the framework regions of a naturally occurring V_{HH} sequence with the corresponding framework sequence of one or more closely related human V_{H} sequences, after which one or more of the potentially useful humanizing substitutions (or combinations thereof) thus determined can be introduced into said V_{HH} sequence (in any manner known per se, as further described herein) and the resulting humanized V_{HH} sequences can be tested for affinity for the target, for stability, for ease and level of expression, and/or for other desired properties. In this way, by means of a limited degree of trial and error, other suitable humanizing substitutions (or suitable combinations thereof) can be determined by the skilled person based on the disclosure herein. Also, based on the foregoing, (the framework regions of) a

[0102] Nanobody may be partially humanized or fully humanized.

[0103] Some particularly preferred humanized Nanobodies of the invention are humanized variants of the Nanobodies of SEQ ID NO's: 441-485.

[0104] Thus, some other preferred Nanobodies of the invention are Nanobodies which can bind (as further defined herein) to VEGF and which:
[0105] i) are a humanized variant of one of the amino acid sequences of SEQ ID NO's: 441-485; and/or
[0106] ii) have at least 80% amino acid identity with at least one of the amino acid sequences of SEQ ID NO's: 441-485, in which for the purposes of determining the degree of amino acid identity, the amino acid residues that form the CDR sequences are disregarded;
   and in which:
[0107] i) preferably one or more of the amino acid residues at positions 11, 37, 44, 45, 47, 83, 84, 103, 104 and 108 according to the Kabat numbering are chosen from the Hallmark residues mentioned in Table A-3 below.

[0108] According to another specific aspect of the invention, the invention provides a number of streches of amino acid residues (i.e. small peptides) that are particularly suited for binding to VEGF. These streches of amino acid residues may be present in, and/or may be corporated into, an amino acid sequence of the invention, in particular in such a way that they form (part of) the antigen binding site of an amino acid sequence of the invention. As these streches of amino acid residues were first generated as CDR sequences of heavy chain antibodies or V_{HH} sequences that were raised against VEGF (or may be based on and/or derived from such CDR sequences, as further described herein), they will also generally be referred to herein as “CDR sequences” (i.e. as CDR1 sequences, CDR2 sequences and CDR3 sequences, respectively). It should however be noted that the invention in its broadest sense is not limited to a specific structural role or function that these streches of amino acid residues may have in an amino acid sequence of the invention, as long as these streches of amino acid residues allow the amino acid sequence of the invention to bind to VEGF. Thus, generally, the invention in its broadest sense comprises any amino acid sequence that is capable of binding to VEGF and that comprises one or more CDR sequences as described herein, and in particular a suitable combination of two or more such CDR sequences, that are suitably linked to each other via one or more further amino acid sequences, such that the entire amino acid sequence forms a binding domain and/or binding unit that is capable of binding to VEGF. It should however also be noted that the presence of only one such. CDR sequence in an amino acid sequence of the invention may by itself already be sufficient to provide an amino acid sequence of the invention that is capable of binding to VEGF; reference is for example again made to the so-called “Expedite fragments” described in WO 03/050531.

[0109] Thus, in another specific, but non-limiting aspect, the amino acid sequence of the invention may be an amino acid sequence that comprises at least one amino acid sequence that is chosen from the group consisting of the CDR1 sequences, CDR2 sequences and CDR3 sequences that are described herein {or any suitable combination thereof). In particular, an amino acid sequence of the invention may be an amino acid sequence that comprises at least one antigen binding site, wherein said antigen binding site comprises at least one amino acid sequence that is chosen from the group consisting of the CDR1 sequences, CDR2 sequences and CDR3 sequences that are described herein (or any suitable combination thereof).

[0110] Generally, in this aspect of the invention, the amino acid sequence of the invention may be any amino acid sequence that comprises at least one stretch of amino acid residues, in which said stretch of amino acid residues has an amino acid sequence that corresponds to the sequence of at least one of the CDR sequences described herein. Such an amino acid sequence may or may not comprise an immunoglobulin fold. For example, and without limitation, such an amino acid sequence may be a suitable fragment of an immunoglobulin sequence that comprises at least one such CDR sequence, but that is not large enough to form a (complete) immunoglobulin fold (reference is for example again made to the “Expedite fragments” described in WO 03/050531). Alternatively, such an amino acid sequence may be a suitable “protein scaffold” that comprises least one stretch of amino acid residues that corresponds to such a CDR sequence (i.e. as part of its antigen binding site). Suitable scaffolds for presenting amino acid sequences will be clear to the skilled person, and for example comprise, without limitation, to binding scaffolds based on or derived from immunoglobulins (i.e. other than the immunoglobulin sequences already described herein), protein scaffolds derived from protein A domains (such as Affibodies™), tendamistat, fibronectin, lipocalin, CTLA-4, T-cell receptors, designed ankyrin repeats, avimers and PDZ domains (Binz et al., Nat. Biotech 2005, Vol 23:1257), and binding moieties based on DNA or RNA including but not limited to DNA or RNA aptamers (Ulrich et al., Comb Chem High Throughput Screen 2006 9(8):619-32).

[0111] Again, any amino acid sequence of the invention that comprises one or more of these CDR sequences is preferably such that it can specifically bind (as defined herein) to VEGF, and more in particular such that it can bind to VEGF with an affinity (suitably measured and/or expressed as a K_{D}-value (actual or apparent), a K_{A}-value (actual or apparent), a kₒₙ-rate and/or a k_{off}-rate, or alternatively as an IC₅₀ value, as further described herein), that is as defined herein.

[0112] More in particular, the amino acid sequences according to this aspect of the invention may be any amino acid sequence that comprises at least one antigen binding site, wherein said antigen binding site comprises at least two amino acid sequences that are chosen from the group consisting of the CDR1 sequences described herein, the CDR2 sequences described herein and the CDR3 sequences described herein, such that (i) when the first amino acid sequence is chosen from the CDR1 sequences described herein, the second amino acid sequence is chosen from the CDR2 sequences described herein or the CDR3 sequences described herein; (ii) when the first amino acid sequence is chosen from the CDR2 sequences described herein, the second amino acid sequence is chosen from the CDR1 sequences described herein or the CDR3 sequences described herein; or (iii) when the first amino acid sequence is chosen from the CDR3 sequences described herein, the second amino acid sequence is chosen from the CDR1 sequences described herein or the CDR3 sequences described herein.

[0113] Even more in particular, the amino acid sequences of the invention may be amino acid sequences that comprise at least one antigen binding site, wherein said antigen binding site comprises at least three amino acid sequences that are chosen from the group consisting of the CDR1 sequences described herein, the CDR2 sequences described herein and the CDR3 sequences described herein, such that the first amino acid sequence is chosen from the CDR1 sequences described herein, the second amino acid sequence is chosen from the CDR2 sequences described herein, and the third amino acid sequence is chosen from the CDR3 sequences described herein. Preferred combinations of CDR1, CDR2 and CDR3 sequences will become clear from the further description herein. As will be clear to the skilled person, such an amino acid sequence is preferably an immunoglobulin sequence (as further described herein), but it may for example also be any other amino acid sequence that comprises a suitable scaffold for presenting said CDR sequences.

[0114] Thus, in one specific, but non-limiting aspect, the invention relates to an amino acid sequence directed against VEGF, that comprises one or more stretches of amino acid residues chosen from the group consisting of:
[0115] a) the amino acid sequences of SEQ ID NO's: 171-215;
[0116] b) amino acid sequences that have at least 80% amino acid identity with at least one of the amino acid sequences of SEQ ID NO's: 171-215;
[0117] c) amino acid sequences that have 3, 2, or 1 amino acid difference with at least one of the amino acid sequences of SEQ ID NO's: 171-215;
[0118] d) the amino acid sequences of SEQ ID NO's: 261-305;
[0119] e) amino acid sequences that have at least 80% amino acid identity with at least one of the amino acid sequences of SEQ ID NO's: 261-305;
[0120] f) amino acid sequences that have 3, 2, or 1 amino acid difference with at least one of the amino acid sequences of SEQ ID NO's: 261-305;
[0121] g) the amino acid sequences of SEQ ID NO's: 351-395;
[0122] h) amino acid sequences that have at least 80% amino acid identity with at least one of the amino acid sequences of SEQ ID NO's: 351-395;
[0123] i) amino acid sequences that have 3, 2, or 1 amino acid difference with at least one of the amino acid sequences of SEQ ID NO's: 351-395;
   or any suitable combination thereof.

[0124] When an amino acid sequence of the invention contains one or more amino acid sequences according to b) and/or c):
[0125] i) any amino acid substitution in such an amino acid sequence according to b) and/or c) is preferably, and compared to the corresponding amino acid sequence according to a), a conservative amino acid substitution, (as defined herein);
   and/or
[0126] ii) the amino acid sequence according to b) and/or c) preferably only contains amino acid substitutions, and no amino acid deletions or insertions, compared to the corresponding amino acid sequence according to a);
   and/or
[0127] iii) the amino acid sequence according to b) and/or c) may be an amino acid sequence that is derived from an amino acid sequence according to a) by means of affinity maturation using one or more techniques of affinity maturation known per se.

[0128] Similarly, when an amino acid sequence of the invention contains one or more amino acid sequences according to e) and/or f):
[0129] i) any amino acid substitution in such an amino acid sequence according to e) and/or 0 is preferably, and compared to the corresponding amino acid sequence according to d), a conservative amino acid substitution, (as defined herein);
   and/or
[0130] ii) the amino acid sequence according to e) and/or f) preferably only contains amino acid substitutions, and no amino acid deletions or insertions, compared to the corresponding amino acid sequence according to d);
   and/or
[0131] iii) the amino acid sequence according to e) and/or f) may be an amino acid sequence that is derived from an amino acid sequence according to d) by means of affinity maturation using one or more techniques of affinity maturation known per se.

[0132] Also, similarly, when an amino acid sequence of the invention contains one or more amino acid sequences according to h) and/or i):
[0133] i) any amino acid substitution in such an amino acid sequence according to h) and/or i) is preferably, and compared to the corresponding amino acid sequence according to g), a conservative amino acid substitution, (as defined herein);
   and/or
[0134] ii) the amino acid sequence according to h) and/or i) preferably only contains amino acid substitutions, and no amino acid deletions or insertions, compared to the corresponding amino acid sequence according to g);
   and/or
[0135] iii) the amino acid sequence according to h) and/or i) may be an amino acid sequence that is derived from an amino acid sequence according to g) by means of affinity maturation using one or more techniques of affinity maturation known per se.

[0136] It should be understood that the last preceding paragraphs also generally apply to any amino acid sequences of the invention that comprise one or more amino acid sequences according to b), c), e), f), h) or i), respectively.

[0137] In this specific aspect, the amino acid sequence preferably comprises one or more stretches of amino acid residues chosen from the group consisting of:
[0138] i) the amino acid sequences of SEQ ID NO's: 171-215;
[0139] ii) the amino acid sequences of SEQ ID NO's: 261-305; and
[0140] iii) the amino acid sequences of SEQ ID NO's: 351-395;
   or any suitable combination thereof.

[0141] Also, preferably, in such an amino acid sequence, at least one of said stretches of amino acid residues forms part of the antigen binding site for binding against VEGF.

[0142] In a more specific, but again non-limiting aspect, the invention relates to an amino acid sequence directed against VEGF, that comprises two or more stretches of amino acid residues chosen from the group consisting of:
[0143] a) the amino acid sequences of SEQ ED NO's: 171-215;
[0144] b) amino acid sequences that have at least 80% amino acid identity with at least one of the amino acid sequences of SEQ ID NO's: 171-215;
[0145] c) amino acid sequences that have 3, 2, or 1 amino acid difference with at least one of the amino acid sequences of SEQ ID NO's: 171-215;
[0146] d) the amino acid sequences of SEQ ID NO's: 261-305;
[0147] e) amino acid sequences that have at least 80% amino acid identity with at least one of the amino acid sequences of SEQ ID NO's: 261-305;
[0148] f) amino acid sequences that have 3, 2, or 1 amino acid difference with at least one of the amino acid sequences of SEQ ID NO's: 261-305;
[0149] g) the amino acid sequences of SEQ ID NO's: 351-395;
[0150] h) amino acid sequences that have at least 80% amino acid identity with at least one of the amino acid sequences of SEQ ID NO's: 351-395;
[0151] i) amino acid sequences that have 3, 2, or 1 amino acid difference with at least one of the amino acid sequences of SEQ ID NO's: 351-395;
   such that (i) when the first stretch of amino acid residues corresponds to one of the amino acid sequences according to a), b) or c), the second stretch of amino acid residues corresponds to one of the amino acid sequences according to d), e), f), g), h) or i); (ii) when the first stretch of amino acid residues corresponds to one of the amino acid sequences according to d), e) or f), the second stretch of amino acid residues corresponds to one of the amino acid sequences according to a), b), c), g), h) or i); or (iii) when the first stretch of amino acid residues corresponds to one of the amino acid sequences according to g), h) or i), the second stretch of amino acid residues corresponds to one of the amino acid sequences according to a), b), c), d), e) or f).

[0152] In this specific aspect, the amino acid sequence preferably comprises two or more stretches of amino acid residues chosen from the group consisting of:
[0153] i) the amino acid sequences of SEQ ID NO's: 171-215;
[0154] ii) the amino acid sequences of SEQ ID NO's: 261-305; and
[0155] iii) the amino acid sequences of SEQ ID NO's: 351-395;
   such that, (i) when the first stretch of amino acid residues corresponds to one of the amino acid sequences of SEQ ID NO's: 171-215, the second stretch of amino acid residues corresponds to one of the amino acid sequences of SEQ ID NO's: 261-305 or of SEQ ID NO's: 351-395; (ii) when the first stretch of amino acid residues corresponds to one of the amino acid sequences of SEQ ID NO's: 261-305, the second stretch of amino acid residues corresponds to one of the amino acid sequences of SEQ ID NO's: 171-215 or of SEQ ID NO's: 351-395; or (iii) when the first stretch of amino acid residues corresponds to one of the amino acid sequences of SEQ ID NO's: 351-395, the second stretch of amino acid residues corresponds to one of the amino acid sequences of SEQ ID NO's: 171-215 or of SEQ ID NO's: 261-305.

[0156] Also, in such an amino acid sequence, the at least two stretches of amino acid residues again preferably form part of the antigen binding site for binding against VEGF.

[0157] In an even more specific, but non-limiting aspect, the invention relates to an amino acid sequence directed against VEGF, that comprises three or more stretches of amino acid residues, in which the first stretch of amino acid residues is chosen from the group consisting of:
[0158] a) the amino acid sequences of SEQ ID NO's: 171-215;
[0159] b) amino acid sequences that have at least 80% amino acid identity with at least one of the amino acid sequences of SEQ ID NO's: 171-215;
[0160] c) amino acid sequences that have 3, 2, or 1 amino acid difference with at least one of the amino acid sequences of SEQ ID NO's: 171-215;
   the second stretch of amino acid residues is chosen from the group consisting of:
[0161] d) the amino acid sequences of SEQ ID NO's: 261-305;
[0162] e) amino acid sequences that have at least 80% amino acid identity with at least one of the amino acid sequences of SEQ ID NO's: 261-305;
[0163] f) amino acid sequences that have 3, 2, or 1 amino acid difference with at least one of the amino acid sequences of SEQ ID NO's: 261-305;
   and the third stretch of amino acid residues is chosen from the group consisting of:
[0164] g) the amino acid sequences of SEQ ID NO's: 351-395;
[0165] h) amino acid sequences that have at least 80% amino acid identity with at least one of the amino acid sequences of SEQ ID NO's: 351-395;
[0166] i) amino acid sequences that have 3, 2, or 1 amino acid difference with at least one of the amino acid sequences of SEQ ID NO's: 351-395.

[0167] Preferably, in this specific aspect, the first stretch of amino acid residues is chosen from the group consisting of the amino acid sequences of SEQ ID NO's: 171-215; the second stretch of amino acid residues is chosen from the group consisting of the amino acid sequences of SEQ ID NO's: 261-305; and the third stretch of amino acid residues is chosen from the group consisting of the amino acid sequences of SEQ ID NO's: 351-395.

[0168] Again, preferably, in such an amino acid sequence, the at least three stretches of amino acid residues forms part of the antigen binding site for binding against VEGF.

[0169] Preferred combinations of such stretches of amino acid sequences will become clear from the further disclosure herein.

[0170] Preferably, in such amino acid sequences the CDR sequences have at least 70% amino acid identity, preferably at least 80% amino acid identity, more preferably at least 90% amino acid identity, such as 95% amino acid identity or more or even essentially 100% amino acid identity with the CDR sequences of at least one of the amino acid sequences of SEQ ID NO's: 441-485. This degree of amino acid identity can for example be determined by determining the degree of amino acid identity (in a manner described herein) between said amino acid sequence and one or more of the sequences of SEQ ID NO's: 441-485, in which the amino acid residues that form the framework regions are disregarded. Also, such amino acid sequences of the invention can be as further described herein.

[0171] Also, such amino acid sequences are preferably such that they can specifically bind (as defined herein) to VEGF; and more in particular bind to VEGF with an affinity (suitably measured and/or expressed as a K_{D}-value (actual or apparent), a K_{A}-value (actual or apparent), a kₒₙ-rate and/or a k_{off}-rate, or alternatively as an IC₅₀ value, as further described herein) that is as defined herein.

[0172] When the amino acid sequence of the invention essentially consists of 4 framework regions (FR1 to FR4, respectively) and 3 complementarity determining regions (CDR1 to CDR3, respectively), the amino acid sequence of the invention is preferably such that:
[0173] CDR1 is chosen from the group consisting of:
[0174] a) the amino acid sequences of SEQ ID NO's: 171-215;
[0175] b) amino acid sequences that have at least 80% amino acid identity with at least one of the amino acid sequences of SEQ ID NO's: 171-215;
[0176] c) amino acid sequences that have 3, 2, or 1 amino acid difference with at least one of the amino acid sequences of SEQ ID NO's: 171-215;
   and/or
   [0177] CDR2 is chosen from the group consisting of:
[0178] d) the amino acid sequences of SEQ ID NO's: 261-305;
[0179] e) amino acid sequences that have at least 80% amino acid identity with at least one of the amino acid sequences of SEQ ID NO's: 261-305;
[0180] f) amino acid sequences that have 3, 2, or 1 amino acid difference with at least one of the amino acid sequences of SEQ ID NO's: 261-305;
   and/or
   [0181] CDR3 is chosen from the group consisting of:
[0182] g) the amino acid sequences of SEQ ID NO's: 351-395;
[0183] h) amino acid sequences that have at least 80% amino acid identity with at east one of the amino acid sequences of SEQ ID NO's: 351-395;
[0184] i) amino acid sequences that have 3, 2, or 1 amino acid difference with at least one of the amino acid sequences of SEQ ID NO's: 351-395.

[0185] In particular, such an amino acid sequence of the invention may be such that CDR1 is chosen from the group consisting of the amino acid sequences of SEQ ID NO's: 171-215; and/or CDR2 is chosen from the group consisting of the amino acid sequences of SEQ ID NO's: 261-305; and/or CDR3 is chosen from the group consisting of the amino acid sequences of SEQ ID NO's: 351-395.

[0186] In particular, when the amino acid sequence of the invention essentially consists of 4 framework regions (FR1 to FR4, respectively) and 3 complementarity determining regions (CDR1 to CDR3, respectively), the amino acid sequence of the invention is preferably such that:
[0187] CDR1 is chosen from the group consisting of:
[0188] a) the amino acid sequences of SEQ ID NO's: 171-215;
[0189] b) amino acid sequences that have at least 80% amino acid identity with at least one of the amino acid sequences of SEQ ID NO's: 171-215;
[0190] c) amino acid sequences that have 3, 2, or 1 amino acid difference with at least one of the amino acid sequences of SEQ ID NO's: 171-215;
   and
   [0191] CDR2 is chosen from the group consisting of:
[0192] d) the amino acid sequences of SEQ ID NO's: 261-305;
[0193] e) amino acid sequences that have at least 80% amino acid identity with at least one of the amino acid sequences of SEQ ID NO's: 261-305;
[0194] f) amino acid sequences that have 3, 2, or 1 amino acid difference with at least one of the amino acid sequences of SEQ ID NO's: 261-305;
   and
   [0195] CDR3 is chosen from the group consisting of:
[0196] g) the amino acid sequences of SEQ ID NO's: 351-395;
[0197] h) amino acid sequences that have at least 80% amino acid identity with at least one of the amino acid sequences of SEQ ID NO's: 351-395;
[0198] i) amino acid sequences that have 3, 2, or 1 amino acid difference with at least one of the amino acid sequences of SEQ ID NO's: 351-395; or any suitable fragment of such an amino acid sequence

[0199] In particular, such an amino acid sequence of the invention may be such that CDR1 is chosen from the group consisting of the amino acid sequences of SEQ ID NO's: 171-215; and CDR2 is chosen from the group consisting of the amino acid sequences of SEQ ID NO's: 261-305; and CDR3 is chosen from the group consisting of the amino acid sequences of SEQ ID NO's: 351-395.

[0200] Again, preferred combinations of CDR sequences will become clear from the further description herein.

[0201] Also, such amino acid sequences are preferably such that they can specifically bind (as defined herein) to VEGF; and more in particular bind to VEGF with an affinity (suitably measured and/or expressed as a K₀-value (actual or apparent), a K_{A}-value (actual or apparent), a kₒₙ-rate and/or a k_{off}-rate, or alternatively as an IC₅₀ value, as further described herein) that is as defined herein.

[0202] In one preferred, but non-limiting aspect, the invention relates to an amino acid sequence that essentially consists of 4 framework regions (FR1 to FR4, respectively) and 3 complementarity determining regions (CDR1 to CDR3, respectively), in which the CDR sequences of said amino acid sequence have at least 70% amino acid identity, preferably at least 80% amino acid identity, more preferably at least 90% amino acid identity, such as 95% amino acid identity or more or even essentially 100% amino acid identity with the CDR sequences of at least one of the amino acid sequences of SEQ ID NO's: 441-485. This degree of amino acid identity can for example be determined by determining the degree of amino acid identity (in a manner described herein) between said amino acid sequence and one or more of the sequences of SEQ ID NO's: 441-485, in which the amino acid residues that form the framework regions are disregarded. Such amino acid sequences of the invention can be as further described herein.

[0203] In such an amino acid sequence of the invention, the framework sequences may be any suitable framework sequences, and examples of suitable framework sequences will be clear to the skilled person, for example on the basis the standard handbooks and the further disclosure and prior art mentioned herein.

[0204] The framework sequences are preferably (a suitable combination of) immunoglobulin framework sequences or framework sequences that have been derived from immunoglobulin framework sequences (for example, by humanization or camelization). For example, the framework sequences may be framework sequences derived from a light chain variable domain (e.g. a V_{L}-sequence) and/or from a heavy chain variable domain (e.g. a V_{H}-sequence). In one particularly preferred aspect, the framework sequences are either framework sequences that have been derived from a V_{HH}-sequence (in which said framework sequences may optionally have been partially or fully hurnanzed) or are conventional V_{H} sequences that have been camelized (as defined herein).

[0205] The framework sequences are preferably such that the amino acid sequence of the invention is a domain antibody (or an amino acid sequence that is suitable for use as a domain antibody); is a single domain antibody (or an amino acid sequence that is suitable for use as a single domain antibody); is a “dAb” (or an amino acid sequence that is suitable for use as a dAb); or is a Nanobody™ (including but not limited to V_{HH} sequence). Again, suitable framework sequences will be clear to the skilled person, for example on the basis the standard handbooks and the further disclosure and prior art mentioned herein.

[0206] In particular, the framework sequences present in the amino acid sequences of the invention may contain one or more of Hallmark residues (as defined herein), such that the amino acid sequence of the invention is a Nanobody™. Some preferred, but non-limiting examples of (suitable combinations of) such framework sequences will become clear from the further disclosure herein.

[0207] Again, as generally described herein for the amino acid sequences of the invention, it is also possible to use suitable fragments (or combinations of fragments) of any of the foregoing, such as fragments that contain one or more CDR sequences, suitably flanked by and/or linked via one or more framework sequences (for example, in the same order as these CDR's and framework sequences may occur in the full-sized immunoglobulin sequence from which the fragment has been derived). Such fragments may also again be such that they comprise or can form an immunoglobulin fold, or alternatively be such that they do not comprise or cannot form an immunoglobulin fold.

[0208] In one specific aspect, such a fragment comprises a single CDR sequence as described herein (and in particular a CDR3 sequence), that is flanked on each side by (part of) a framework sequence (and in particular, part of the framework sequence(s) that, in the immunoglobulin sequence from which the fragment is derived, are adjacent to said CDR sequence. For example, a CDR3 sequence may be preceded by (part of) a FR3 sequence and followed by (part of) a FR4 sequence). Such a fragment may also contain a disulphide bridge, and in particular a disulphide bridge that links the two framework regions that precede and follow the CDR sequence, respectively (for the purpose of forming such a disulphide bridge, cysteine residues that naturally occur in said framework regions may be used, or alternatively cysteine residues may be synthetically added to or introduced into said framework regions). For a further description of these “Expedite fragments”, reference is again made to WO 03/050531, as well as to the US provisional application of Ablynx N.V. entitled “Peptides capable of binding to serum proteins” of Ablynx N.V. (inventors: Revets, Hilde Adi Pierrette; Kolkman, Joost Alexander; and Hoogenboom, Hendricus Renerus Jacobus Mattheus) filed on Dec. 5, 2006 (see also PCT/EP2007/063348).

[0209] In another aspect, the invention relates to a compound or construct, and in particular a protein or polypeptide (also referred to herein as a “compound of the invention” or “polypeptide of the invention”, respectively) that comprises or essentially consists of one or more amino acid sequences of the invention (or suitable fragments thereof), and optionally further comprises one or more other groups, residues, moieties or binding units. As will become clear to the skilled person from the further disclosure herein, such further groups, residues, moieties, binding units or amino acid sequences may or may not provide further functionality to the amino acid sequence of the invention (and/or to the compound or construct in which it is present) and may or may not modify the properties of the amino acid sequence of the invention.

[0210] For example, such further groups, residues, moieties or binding units may be one or more additional amino acid sequences, such that the compound or construct is a (fusion) protein or (fusion) polypeptide. In a preferred but non-limiting aspect, said one or more other groups, residues, moieties or binding units are immunoglobulin sequences. Even more preferably, said one or more other groups, residues, moieties or binding units are chosen from the group consisting of domain antibodies, amino acid sequences that are suitable for use as a domain antibody, single domain antibodies, amino acid sequences that are suitable for use as a single domain antibody, “dAb”'s, amino acid sequences that are suitable for use as a dAb, or Nanobodies.

[0211] Alternatively, such groups, residues, moieties or binding units may for example be chemical groups, residues, moieties, which may or may not by themselves be biologically and/or pharmacologically active. For example, and without limitation, such groups may be linked to the one or more amino acid sequences of the invention so as to provide a “derivative” of an amino acid sequence or polypeptide of the invention, as further described herein.

[0212] Also within the scope of the present invention are compounds or constructs, that comprises or essentially consists of one or more derivatives as described herein, and optionally further comprises one or more other groups, residues, moieties or binding units, optionally linked via one or more linkers. Preferably, said one or more other groups, residues, moieties or binding units are amino acid sequences.

[0213] In the compounds or constructs described above, the one or more amino acid sequences of the invention and the one or more groups, residues, moieties or binding units may be linked directly to each other and/or via one or more suitable linkers or spacers. For example, when the one or more groups, residues, moieties or binding units are amino acid sequences, the linkers may also be amino acid sequences, so that the resulting compound or construct is a fusion (protein) or fusion (polypeptide).

[0214] The compounds or polypeptides of the invention can generally be prepared by a method which comprises at least one step of suitably linking the one or more amino acid sequences of the invention to the one or more further groups, residues, moieties or binding units, optionally via the one or more suitable linkers, so as to provide the compound or polypeptide of the invention. Polypeptides of the invention can also be prepared by a method which generally comprises at least the steps of providing a nucleic acid that encodes a polypeptide of the invention, expressing said nucleic acid in a suitable manner, and recovering the expressed polypeptide of the invention. Such methods can be performed in a manner known per se, which will be clear to the skilled person, for example on the basis of the methods and techniques further described herein.

[0215] The process of designing/selecting and/or preparing a compound or polypeptide of the invention, starting from an amino acid sequence of the invention, is also referred to herein as “formatting” said amino acid sequence of the invention; and an amino acid of the invention that is made part of a compound or polypeptide of the invention is said to be “formatted” or to be “in the format of” said compound or polypeptide of the invention. Examples of ways in which an amino acid sequence of the invention can be formatted and examples of such formats will be clear to the skilled person based on the disclosure herein; and such formatted amino acid sequences form a further aspect of the invention.

[0216] In one specific aspect of the invention, a compound of the invention or a polypeptide of the invention may have an increased half-life, compared to the corresponding amino acid sequence of the invention. Some preferred, but non-limiting examples of such compounds and polypeptides will become clear to the skilled person based on the further disclosure herein, and for example comprise amino acid sequences or polypeptides of the invention that have been chemically modified to increase the half-life thereof (for example, by means of pegylation); amino acid sequences of the invention that comprise at least one additional binding site for binding to a serum protein (such as serum albumin, see for example EP 0 368 684 B 1, page 4); or polypeptides of the invention that comprise at least one amino acid sequence of the invention that is linked to at least one moiety (and in particular at least one amino acid sequence) that increases the half-life of the amino acid sequence of the invention. Examples of polypeptides of the invention that comprise such half-life extending moieties or amino acid sequences will become clear to the skilled person based on the further disclosure herein; and for example include, without limitation, polypeptides in which the one or more amino acid sequences of the invention are suitable linked to one or more serum proteins or fragments thereof (such as (human) serum albumin or suitable fragments thereof) or to one or more binding units that can bind to serum proteins (such as, for example, domain antibodies, amino acid sequences that are suitable for use as a domain antibody, single domain antibodies, amino acid sequences that are suitable for use as a single domain antibody, “dAb”'s, amino acid sequences that are suitable for use as a dAb, or Nanobodies that can bind to serum proteins such as serum albumin (such as human serum albumin), serum immunoglobulins such as IgG, or transferrine; reference is made to the further description and references mentioned herein); polypeptides in which an amino acid sequence of the invention is linked to an Fc portion (such as a human Fc) or a suitable part or fragment thereof; or polypeptides in which the one or more amino acid sequences of the invention are suitable linked to one or more small proteins or peptides that can bind to serum proteins (such as, without limitation, the proteins and peptides described in WO 91/01743, WO 01145746, WO 02/076489 and to the US provisional application of Ablynx N.V. entitled “Peptides capable of binding to serum proteins” of Ablynx N.V. filed on Dec. 5, 2006 (see also PCT/EP2007/063348).

[0217] Generally, the compounds or polypeptides of the invention with increased half-life preferably have a half-life that is at least 1.5 times, preferably at least 2 times, such as at least 5 times, for example at least 10 times or more than 20 times, greater than the half-life of the corresponding amino acid sequence of the invention per se. For example, the compounds or polypeptides of the invention with increased half-life may have a half-life that is increased with more than 1 hours, preferably more than 2 hours, more preferably more than 6 hours, such as more than 12 hours, or even more than 24, 48 or 72 hours, compared to the corresponding amino acid sequence of the invention per se.

[0218] In a preferred, but non-limiting aspect of the invention, such compounds or polypeptides of the invention have a serum half-life that is increased with more than 1 hours, preferably more than 2 hours, more preferably more than 6 hours, such as more than 12 hours, or even more than 24, 48 or 72 hours, compared to the corresponding amino acid sequence of the invention per se.

[0219] In another preferred, but non-limiting aspect of the invention, such compounds or polypeptides of the invention exhibit a serum half-life in human of at least about 12 hours, preferably at least 24 hours, more preferably at least 48 hours, even more preferably at least 72 hours or more. For example, compounds or polypeptides of the invention may have a half-life of at least 5 days (such as about 5 to 10 days), preferably at least 9 days (such as about 9 to 14 days), more preferably at least about 10 days (such as about 10 to 15 days), or at least about 11 days (such as about 11 to 16 days), more preferably at least about 12 days (such as about 12 to 18 days or more), or more than 14 days (such as about 14 to 19 days).

[0220] In another aspect, the invention relates to a nucleic acid that encodes an amino acid sequence of the invention or a polypeptide of the invention (or a suitable fragment thereof). Such a nucleic acid will also be referred to herein as a “nucleic acid of the invention” and may for example be in the form of a genetic construct, as further described herein.

[0221] In another aspect, the invention relates to a host or host cell that expresses (or that under suitable circumstances is capable of expressing) an amino acid sequence of the invention and/or a polypeptide of the invention; and/or that contains a nucleic acid of the invention. Some preferred but non-limiting examples of such hosts or host cells will become clear from the further description herein.

[0222] The invention further relates to a product or composition containing or comprising at least one amino acid sequence of the invention, at least one polypeptide of the invention (or a suitable fragment thereof) and/or at least one nucleic acid of the invention, and optionally one or more further components of such compositions known per se, i.e. depending on the intended use of the composition. Such a product or composition may for example be a pharmaceutical composition (as described herein), a veterinary composition or a product or composition for diagnostic use (as also described herein). Some preferred but non-limiting examples of such products or compositions will become clear from the further description herein.

[0223] The invention also relates to the use of an amino acid sequence, Nanobody or polypeptide of the invention, or of a composition comprising the same, in (methods or compositions for) modulating VEGF, either in vitro (e.g. in an in vitro or cellular assay) or in vivo (e.g. in an a single cell or in a multicellular organism, and in particular in a mammal, and more in particular in a human being, such as in a human being that is at risk of or suffers from a [insert diseases and disorders]).

[0224] The invention also relates to methods for modulating VEGF, either in vitro (e.g. in an in vitro or cellular assay) or in vivo (e.g. in an a single cell or multicellular organism, and in particular in a mammal, and more in particular in a human being, such as in a human being that is at risk of or suffers from a condition or disease characterized by excessive and/or pathological angiogenesis or neovascularization), which method comprises at least the step of contacting VEGF with at least one amino acid sequence, Nanobody or polypeptide of the invention, or with a composition comprising the same, in a manner and in an amount suitable to modulate VEGF, with at least one amino acid sequence, Nanobody or polypeptide of the invention.

[0225] The invention also relates to the use of an one amino acid sequence, Nanobody or polypeptide of the invention in the preparation of a composition (such as, without limitation, a pharmaceutical composition or preparation as further described herein) for modulating VEGF, either in vitro (e.g. in an in vitro or cellular assay) or in vivo (e.g. in an a single cell or multicellular organism, and in particular in a mammal, and more in particular in a human being, such as in a human being that is at risk of or suffers from a condition or disease characterized by excessive and/or pathological angiogenesis or neovascularization).

[0226] In the context of the present invention, “modulating” or “to modulate” generally means either reducing or inhibiting the activity of, or alternatively increasing the activity of, VEGF, as measured using a suitable in vitro, cellular or in vivo assay (such as those mentioned herein). In particular, “modulating” or “to modulate” may mean either reducing or inhibiting the activity of, or alternatively increasing the activity of VEGF, as measured using a suitable in vitro, cellular or in vivo assay (such as those mentioned herein), by at least 1%, preferably at least 5%, such as at least 10% or at least 25%, for example by at least 50%, at least 60%, at least 70%, at least 80%, or 90% or more, compared to the activity of VEGF in the same assay under the same conditions but without the presence of the amino acid sequence, Nanobody or polypeptide of the invention.

[0227] As will be clear to the skilled person, “modulating” may also involve effecting a change (which may either be an increase or a descrease) in affinity, avidity, specificity and/or selectivity of VEGF for one or more of its targets, ligands or substrates; and/or effecting a change (which may either be an increase or a decrease) in the sensitivity of VEGF for one or more conditions in the medium or surroundings in which VEGF is present (such as pH, ion strength, the presence of co-factors, etc.), compared to the same conditions but without the presence of the amino acid sequence, Nanobody or polypeptide of the invention. As will be clear to the skilled person, this may again be determined in any suitable manner and/or using any suitable assay known per se, such as the assays described herein or in the prior art cited herein.

[0228] “Modulating” may also mean effecting a change (i.e. an activity as an agonist or as an antagonist, respectively) with respect to one or more biological or physiological mechanisms, effects, responses, functions, pathways or activities in which VEGF (or in which its substrate(s), ligand(s) or pathway(s) are involved, such as its signalling pathway or metabolic pathway and their associated biological or physiological effects) is involved. Again, as will be clear to the skilled person, such an action as an agonist or an antagonist may be determined in any suitable manner and/or using any suitable (in vitro and usually cellular or in assay) assay known per se, such as the assays described herein or in the prior art cited herein. In particular, an action as an agonist or antagonist may be such that an intended biological or physiological activity is increased or decreased, respectively, by at least 1%, preferably at least 5%, such as at least 10% or at least 25%, for example by at least 50%, at least 60%, at least 70%, at least 80%, or 90% or more, compared to the biological or physiological activity in the same assay under the same conditions but without the presence of the amino acid sequence, Nanobody or polypeptide of the invention.

[0229] Modulating may for example involve reducing or inhibiting the binding of VEGF to one of its substrates or ligands and/or competing with a natural ligand, substrate for binding to VEGF. Inhibition or blocking of the binding of VEGF to its receptor may reduce the effect of excessive angiogenesis and/or neovascularisation, such as for example in the different cancers, tumors and carinomas as described herein as well as in non-neoplastic diseases such as rheumatoid arthritis, AMD, psoriasis, etc. (see supra). Preferably excessive angiogenesis and/or neovascularisation is reduced by at least 1%, preferably at least 5%, such as at least 10% or at least 25%, for example by at least 50%, at least 60%, at least 70%, at least 80%, or 90% or more, compared to angiogenesis and/or neovascularisation in the same assay under the same conditions but without the presence of the amino acid sequence, Nanobody or polypeptide of the invention.

[0230] In one aspect, the amino acid sequence, Nanobody or polypeptide of the invention inhibit and/or blocks binding of VEGF to VEGFR-1. Preferably the binding of VEGF to VEGFR-1 is inhibited by at least 1%, preferably at least 5%, such as at least 10% or at least 25%, for example by at least 50%, at least 60%, at least 70%, at least 80%, or 90% or more, compared to the binding in the same assay under the same conditions but without the presence of the amino acid sequence, Nanobody or polypeptide of the invention.

[0231] In another aspect, the amino acid sequence, Nanobody or polypeptide of the invention inhibits and/or blocks binding of VEGF to VEGFR-1 without inhibiting binding of VEGF to VEGFR-2. Preferably the binding of VEGF to VEGFR-1 is inhibited by at least 1%, preferably at least 5%, such as at least 10% or at least 25%, for example by at least 50%, at least 60%, at least 70%, at least 80%, or 90% or more, compared to the binding in the same assay under the same conditions but without the presence of the amino acid sequence, Nanobody or polypeptide of the invention.

[0232] In another aspect, the amino acid sequence, Nanobody or polypeptide of the invention inhibit and/or blocks binding of VEGF to VEGFR-2. Preferably the binding of VEGF to VEGFR-2 is inhibited by at least 1%, preferably at least 5%, such as at least 10% or at least 25%, for example by at least 50%, at least 60%, at least 70%, at least 80%, or 90% or more, compared to the binding in the same assay under the same conditions but without the presence of the amino acid sequence, Nanohody or polypeptide of the invention.

[0233] In another aspect, the amino acid sequence, Nanohody or polypeptide of the invention inhibits and/or blocks binding of VEGF to VEGFR-2 without inhibiting binding of VEGF to VEGFR-1. Preferably the binding of VEGF to VEGFR-2 is inhibited by at least 1%, preferably at least 5%, such as at least 10% or at least 25%, for example by at least 50%, at least 60%, at least 70%, at least 80%, or 90% or more, compared to the binding in the same assay under the same conditions but without the presence of the amino acid sequence, Nanohody or polypeptide of the invention.

[0234] In yet another aspect, the amino acid sequence, Nanobody or polypeptide of the invention inhibits and/or blocks binding of VEGF to VEGFR-1 and the binding of VEGF to VEGFR-2. Preferably the binding of VEGF to VEGFR-1 and/or of VEGF to VEGFR-2 is inhibited by at least 1%, preferably at least 5%, such as at least 10% or at least 25%, for example by at least 50%, at least 60%, at least 70%, at least 80%, or 90% or more, compared to the binding in the same assay under the same conditions but without the presence of the amino acid sequence, Nanobody or polypeptide of the invention.

[0235] Modulating may also involve activating VEGF or the mechanism or pathway in which it is involved (e.g. with an amino acid or polypeptide of the invention with an increased half-life), which may be relevant for treatment of ischaemic conditions such as for example peripheral arhterial occlusion (PAO) and revascularization ischemic heart tissue.

[0236] Modulating may be reversible or irreversible, but for pharmaceutical and pharmacological purposes will usually be in a reversible manner.

[0237] The invention further relates to methods for preparing or generating the amino acid sequences, polypeptides, nucleic acids, host cells, products and compositions described herein. Some preferred but non-limiting examples of such methods will become clear from the further description herein.

[0238] Generally, these methods may comprise the steps of:
[0239] a) providing a set, collection or library of amino acid sequences; and
[0240] b) screening said set, collection or library of amino acid sequences for amino acid sequences that can bind to and/or have affinity for VEGF;
   and
[0241] c) isolating the amino acid sequence(s) that can bind to and/or have affinity for VEGF.

[0242] In such a method, the set, collection or library of amino acid sequences may be any suitable set, collection or library of amino acid sequences. For example, the set, collection or library of amino acid sequences may be a set, collection or library of immunoglobulin sequences (as described herein), such as a naïve set, collection or library of immunoglobulin sequences; a synthetic or semi-synthetic set, collection or library of immunoglobulin sequences; and/or a set, collection or library of immunoglobulin sequences that have been subjected to affinity maturation.

[0243] Also, in such a method, the set, collection or library of amino acid sequences may be a set, collection or library of heavy chain variable domains (such as V_{H} domains or V_{HH} domains) or of light chain variable domains. For example, the set, collection or library of amino acid sequences may be a set, collection or library of domain antibodies or single domain antibodies, or may be a set, collection or library of amino acid sequences that are capable of functioning as a domain antibody or single domain antibody.

[0244] In a preferred aspect of this method, the set, collection or library of amino acid sequences may be an immune set, collection or library of immunoglobulin sequences, for example derived from a mammal that has been suitably immunized with VEGF or with a suitable antigenic determinant based thereon or derived therefrom, such as an antigenic part, fragment, region, domain, loop or other epitope thereof. In one particular aspect, said antigenic determinant may be an extracellular part, region, domain, loop or other extracellular epitope(s).

[0245] In the above methods, the set, collection or library of amino acid sequences may be displayed on a phage, phagemid, ribosome or suitable micro-organism (such as yeast), such as to facilitate screening. Suitable methods, techniques and host organisms for displaying and screening (a set, collection or library of) amino acid sequences will be clear to the person skilled in the art, for example on the basis of the further disclosure herein. Reference is also made to the review by Hoogenboom in Nature Biotechnology, 23, 9, 1105-1116 (2005).

[0246] In another aspect, the method for generating amino acid sequences comprises at least the steps of:
[0247] a) providing a collection or sample of cells expressing amino acid sequences;
[0248] b) screening said collection or sample of cells for cells that express an amino acid sequence that can bind to and/or have affinity for VEGF;
   and
[0249] c) either (i) isolating said amino acid sequence; or (ii) isolating from said cell a nucleic acid sequence that encodes said amino acid sequence, followed by expressing said amino acid sequence.

[0250] For example, when the desired amino acid sequence is an immunoglobulin sequence, the collection or sample of cells may for example be a collection or sample of B-cells. Also, in this method, the sample of cells may be derived from a mammal that has been suitably immunized with VEGF or with a suitable antigenic determinant based thereon or derived therefrom, such as an antigenic part, fragment, region, domain, loop or other epitope thereof. In one particular aspect, said antigenic determinant may be an extracellular part, region, domain, loop or other extracellular epitope(s).

[0251] The above method may be performed in any suitable manner, as will be clear to the skilled person. Reference is for example made to EP 0 542 810, WO 05/19824, WO 04/051268 and WO 04/106377. The screening of step b) is preferably performed using a flow cytometry technique such as FACS. For this, reference is for example made to Lieby et al., Blood, Vol. 97, No. 12, 3820 (2001).

[0252] In another aspect, the method for generating an amino acid sequence directed against VEGF may comprise at least the steps of:
[0253] a) providing a set, collection or library of nucleic acid sequences encoding amino acid sequences;
[0254] b) screening said set, collection or library of nucleic acid sequences for nucleic acid sequences that encode an amino acid sequence that can bind to and/or has affinity for VEGF;
   and
[0255] c) isolating said nucleic acid sequence, followed by expressing said amino acid sequence.

[0256] In such a method, the set, collection or library of nucleic acid sequences encoding amino acid sequences may for example be a set, collection or library of nucleic acid sequences encoding a naïve set, collection or library of immunoglobulin sequences; a set, collection or library of nucleic acid sequences encoding a synthetic or semi-synthetic set, collection or library of immunoglobulin sequences; and/or a set, collection or library of nucleic acid sequences encoding a set, collection or library of immunoglobulin sequences that have been subjected to affinity maturation.

[0257] Also, in such a method, the set, collection or library of nucleic acid sequences may encode a set, collection or library of heavy chain variable domains (such as V_{H} domains or V_{HH} domains) or of light chain variable domains. For example, the set, collection or library of nucleic acid sequences may encode a set, collection or library of domain antibodies or single domain antibodies, or a set, collection or library of amino acid sequences that are capable of functioning as a domain antibody or single domain antibody.

[0258] In a preferred aspect of this method, the set, collection or library of amino acid sequences may be an immune set, collection or library of nucleic acid sequences, for example derived from a mammal that has been suitably immunized with VEGF or with a suitable antigenic determinant based thereon or derived therefrom, such as an antigenic part, fragment, region, domain, loop or other epitope thereof. In one particular aspect, said 1.0 antigenic determinant may be an extracellular part, region, domain, loop or other extracellular epitope(s).

[0259] The set, collection or library of nucleic acid sequences may for example encode an immune set, collection or library of heavy chain variable domains or of light chain variable domains. In one specific aspect, the set, collection or library of nucleotide sequences may encode a set, collection or library of V_{HH} sequences.

[0260] In the above methods, the set, collection or library of nucleotide sequences may be displayed on a phage, phagemid, ribosome or suitable micro-organism (such as yeast), such as to facilitate screening. Suitable methods, techniques and host organisms for displaying and screening (a set, collection or library of) nucleotide sequences encoding amino acid sequences will be clear to the person skilled in the art, for example on the basis of the further disclosure herein. Reference is also made to the review by Hoogenboom in Nature Biotechnology, 23, 9, 1105-1116 (2005).

[0261] The invention also relates to amino acid sequences that are obtained by the above methods, or alternatively by a method that comprises the one of the above methods and in addition at least the steps of determining the nucleotide sequence or amino acid sequence of said immunoglobulin sequence; and of expressing or synthesizing said amino acid sequence in a manner known per se, such as by expression in a suitable host cell or host organism or by chemical synthesis.

[0262] Also, following the steps above, one or more amino acid sequences of the invention may be suitably humanized (or alternatively carnelized); and/or the amino acid sequence(s) thus obtained may be linked to each other or to one or more other suitable amino acid sequences (optionally via one or more suitable linkers) so as to provide a polypeptide of the invention. Also, a nucleic acid sequence encoding an amino acid sequence of the invention may be suitably humanized (or alternatively camelized) and suitably expressed; and/or one or more nucleic acid sequences encoding an amino acid sequence of the invention may be linked to each other or to one or more nucleic acid sequences that encode other suitable amino acid sequences (optionally via nucleotide sequences that encode one or more suitable linkers), after which the nucleotide sequence thus obtained may be suitably expressed so as to provide a polypeptide of the invention.

[0263] The invention further relates to applications and uses of the amino acid sequences, compounds, constructs, polypeptides, nucleic acids, host cells, products and compositions described herein, as well as to methods for the prevention and/or treatment for diseases and disorders associated with VEGF. Some preferred but non-limiting applications and uses will become clear from the further description herein.

[0264] The invention also relates to the amino acid sequences, compounds, constructs, polypeptides, nucleic acids, host cells, products and compositions described herein for use in therapy.

[0265] In particular, the invention also relates to the amino acid sequences, compounds, constructs, polypeptides, nucleic acids, host cells, products and compositions described herein for use in therapy of a disease or disorder that can be prevented or treated by administering, to a subject in need thereof, of (a pharmaceutically effective amount of) an amino acid sequence, compound, construct or polypeptide as described herein.

[0266] More in particular, the invention relates to the amino acid sequences, compounds, constructs, polypeptides, nucleic acids, host cells, products and compositions described herein for use in therapy of conditions and diseases characterized by excessive and/or pathological angiogenesis or neovascularization.

[0267] Other aspects, embodiments, advantages and applications of the invention will also become clear from the further description herein, in which the invention will be described and discussed in more detail with reference to the Nanobodies of the invention and polypeptides of the invention comprising the same, which form some of the preferred aspects of the invention.

[0268] As will become clear from the further description herein, Nanobodies generally offer certain advantages (outlined herein) compared to “dAb's” or similar (single) domain antibodies or immunoglobulin sequences, which advantages are also provided by the Nanobodies of the invention. However, it will be clear to the skilled person that the more general aspects of the teaching below can also be applied (either directly or analogously) to other amino acid sequences of the invention.

### DETAILED DESCRIPTION OF THE INVENTION

[0269] In the present description, examples and claims:
[0270] a) Unless indicated or defined otherwise, all terms used have their usual meaning in the art, which will be clear to the skilled person. Reference is for example made to the standard handbooks, such as Sambrook et al, “Molecular Cloning: A Laboratory Manual” (2nd.Ed.), Vols. 1-3, Cold Spring Harbor Laboratory Press (1989); F. Ausubel et al, eds., “Current protocols in molecular biology”, Green Publishing and Wiley Interscience, New York (1987); Lewin, “Genes II”, John Wiley & Sons, New York, N.Y., (1985); Old et al., “Principles of Gene Manipulation: An Introduction to Genetic Engineering”, 2nd edition, University of California Press, Berkeley, Calif. (1981); Roitt et al., “Immunology” (6th. Ed.), Mosby/Elsevier, Edinburgh (2001); Roitt et al., Roitt's Essential Immunology, 10^{th} Ed. Blackwell Publishing, UK (2001); and Janeway et al., “Immunobiology” (6th Ed.), Garland Science Publishing/Churchill Livingstone, N.Y. (2005), as well as to the general background art cited herein;
[0271] b) Unless indicated otherwise, the term “immunoglobulin sequence”—whether used herein to refer to a heavy chain antibody or to a conventional 4-chain antibody—is used as a general term to include both the full-size antibody, the individual chains thereof, as well as all parts, domains or fragments thereof (including but not limited to antigen-binding domains or fragments such as V_{HH} domains or V_{H}/V_{L} domains, respectively). In addition, the term “sequence” as used herein (for example in terms like “immunoglobulin sequence”, “antibody sequence”, “variable domain sequence”, “V_{HH} sequence” or “protein sequence”), should generally be understood to include both the relevant amino acid sequence as well as nucleic acids or nucleotide sequences encoding the same, unless the context requires a more limited interpretation. Also, the term “nucleotide sequence” as used herein also encompasses a nucleic acid molecule with said nucleotide sequence, so that the terms “nucleotide sequence” and “nucleic acid” should be considered equivalent and are used interchangeably herein;
[0272] c) Unless indicated otherwise, all methods, steps, techniques and manipulations that are not specifically described in detail can be performed and have been performed in a manner known per se, as will be clear to the skilled person. Reference is for example again made to the standard handbooks and the general background art mentioned herein and to the further references cited therein; as well as to for example the following reviews Presta, Adv. Drug Deliv. Rev. 2006, 58 (5-6): 640-56; Levin and Weiss, Mol. Biosyst. 2006, 2(1): 49-57; Irving et al., J. Immunol. Methods, 2001, 248(1-2), 31-45; Schmitz et at, Placenta, 2000, 21 Suppl. A, S106-12, Gonzales et al., Tumour Biol., 2005, 26(1), 31-43, which describe techniques for protein engineering, such as affinity maturation and other techniques for improving the specificity and other desired properties of proteins such as immunoglobulins.
[0273] d) Amino acid residues will be indicated according to the standard three-letter or one-letter amino acid code, as mentioned in Table A-2;

TABLE A-2
one-letter and three-letter amino acid code

| | | | |
|---|---|---|---|
| Nonpolar, | Alanine | Ala | A |
| uncharged | Valine | Val | V |
| (at pH 6.0-7.0)⁽³⁾ | Leucine | Leu | L |
| | Isoleucine | Ile | I |
| | Phenylalanine | Phe | F |
| | Methionine⁽¹⁾ | Met | M |
| | Tryptophan | Trp | W |
| | Proline | Pro | P |
| Polar, | Glycine⁽²⁾ | Gly | G |
| uncharged | Serine | Ser | S |
| (at pH 6.0-7.0) | Threonine | Thr | T |
| | Cysteine | Cys | C |
| | Asparagine | Asn | N |
| | Glutamine | Gln | Q |
| | Tyrosine | Tyr | Y |
| Polar, | Lysine | Lys | K |
| charged | Arginine | Arg | R |
| (at pH 6.0-7.0) | Histidine⁽⁴⁾ | His | H |
| | Aspartate | Asp | D |
| | Glutamate | Glu | E |

Notes:
⁽¹⁾Sometimes also considered to be a polar uncharged amino acid.
⁽²⁾Sometimes also considered to be a nonpolar uncharged amino acid.
⁽³⁾As will be clear to the skilled person, the fact that an amino acid residue is referred to in this Table as being either charged or uncharged at pH 6.0 to 7.0 does not reflect in any way on the charge said amino acid residue may have at a pH lower than 6.0 and/or at a pH higher than 7.0; the amino acid residues mentioned in the Table can be either charged and/or uncharged at such a higher or lower pH, as will be clear to the skilled person.
⁽⁴⁾As is known in the art, the charge of a His residue is greatly dependant upon even small shifts in pH, but a His residu can generally be considered essentially uncharged at a pH of about 6.5.

[0274] e) For the purposes of comparing two or more nucleotide sequences, the percentage of “sequence identity” between a first nucleotide sequence and a second nucleotide sequence may be calculated by dividing [the number of nucleotides in the first nucleotide sequence that are identical to the nucleotides at the corresponding positions in the second nucleotide sequence] by [the total number of nucleotides in the first nucleotide sequence] and multiplying by [100%], in which each deletion, insertion, substitution or addition of a nucleotide in the second nucleotide sequence—compared to the first nucleotide sequence—is considered as a difference at a single nucleotide (position).
   [0275] Alternatively, the degree of sequence identity between two or more nucleotide sequences may be calculated using a known computer algorithm for sequence alignment such as NCBI Blast v2.0, using standard settings.
   [0276] Some other techniques, computer algorithms and settings for determining the degree of sequence identity are for example described in WO 04/037999, EP 0 967 284, EP 1 085 089, WO 00/55318, WO 00/78972, WO 98/49185 and GB 2 357 768-A.
   [0277] Usually, for the purpose of determining the percentage of “sequence identity” between two nucleotide sequences in accordance with the calculation method outlined hereinabove, the nucleotide sequence with the greatest number of nucleotides will be taken as the “first” nucleotide sequence, and the other nucleotide sequence will be taken as the “second” nucleotide sequence;
[0278] f) For the purposes of comparing two or more amino acid sequences, the percentage of “sequence identity” between a first amino acid sequence and a second amino acid sequence (also referred to herein as “amino acid identity”) may be calculated by dividing [the number of amino acid residues in the first amino acid sequence that are identical to the amino acid residues at the corresponding positions in the second amino acid sequence] by [the total number of amino acid residues in the first amino acid sequence] and multiplying by [100%], in which each deletion, insertion, substitution or addition of an amino acid residue in the second amino acid sequence—compared to the first amino acid sequence—is considered as a difference at a single amino acid residue (position), i.e. as an “amino acid difference” as defined herein.
   [0279] Alternatively, the degree of sequence identity between two amino acid sequences may be calculated using a known computer algorithm, such as those mentioned above for determining the degree of sequence identity for nucleotide sequences, again using standard settings.
   [0280] Usually, for the purpose of determining the percentage of “sequence identity” between two amino acid sequences in accordance with the calculation method outlined hereinabove, the amino acid sequence with the greatest number of amino acid residues will be taken as the “first” amino acid sequence, and the other amino acid sequence will be taken as the “second” amino acid sequence.
   [0281] Also, in determining the degree of sequence identity between two amino acid sequences, the skilled person may take into account so-called “conservative” amino acid substitutions, which can generally be described as amino acid substitutions in which an amino acid residue is replaced with another amino acid residue of similar chemical structure and which has little or essentially no influence on the function, activity or other biological properties of the polypeptide. Such conservative amino acid substitutions are well known in the art, for example from WO 04/037999, GB-A-3 357 768, WO 98/49185, WO 00/46383 and WO 01/09300; and (preferred) types and/or combinations of such substitutions may be selected on the basis of the pertinent teachings from WO 04/037999 as well as WO 98/49185 and from the further references cited therein.
   [0282] Such conservative substitutions preferably are substitutions in which one amino acid within the following groups (a)-(e) is substituted by another amino acid residue within the same group: (a) small aliphatic, nonpolar or slightly polar residues: Ala, Ser, Thr, Pro and Gly; (b) polar, negatively charged residues and their (uncharged) amides: Asp, Asn, Glu and Gin; (c) polar, positively charged residues: His, Arg and Lys; (d) large aliphatic, nonpolar residues: Met, Leu, Ile, Val and Cys; and (e) aromatic residues: Phe, Tyr and Trp.
   [0283] Particularly preferred conservative substitutions are as follows: Ala into Gly or into Ser; Arg into Lys; Asn into Gin or into His; Asp into Glu; Cys into Ser; Gln into Asn; Glu into Asp; Gly into Ala or into Pro; His into Asn or into Gin; Ile into Leu or into Val; Leu into Ile or into Vat; Lys into Arg, into Gin or into Glu; Met into Leu, into Tyr or into Ile; Phe into Met, into Leu or into Tyr; Ser into Thr; Thr into Ser; Trp into Tyr; Tyr into Trp; and/or Phe into Val, into Ile or into Leu.
   [0284] Any amino acid substitutions applied to the polypeptides described herein may also be based on the analysis of the frequencies of amino acid variations between homologous proteins of different species developed by Schulz et al., Principles of Protein Structure, Springer-Verlag, 1978, on the analyses of structure forming potentials developed by Chou and Fasman, Biochemistry 13: 211, 1974 and Adv. Enzymol., 47: 45-149, 1978, and on the analysis of hydrophobicity patterns in proteins developed by Eisenberg et al., Proc. Nad. Acad Sci. USA 81: 140-144, 1984; Kyte & Doolittle; J Molec. Biol. 157: 105-132, 198 1, and Goldman et al., Ann. Rev. Biophys. Chem. 15: 321-353, 1986, all incorporated herein in their entirety by reference. Information on the primary, secondary and tertiary structure of Nanobodies is given in the description herein and in the general background art cited above. Also, for this purpose, the crystal structure of a V_{HH} domain from a llama is for example given by Desmyter et al., Nature Structural Biology, Vol. 3, 9, 803 (1996); Spinelli et al., Natural Structural Biology (1996); 3, 752-757; and Decanniere et al., Structure, Vol. 7, 4, 361 (1999). Further information about some of the amino acid residues that in conventional V_{H} domains form the V_{H}/V_{L} interface and potential camelizing substitutions on these positions can be found in the prior art cited above.
[0285] g) Amino acid sequences and nucleic acid sequences are said to be “exactly the same” if they have 100% sequence identity (as defined herein) over their entire length;
[0286] h) When comparing two amino acid sequences, the term “amino acid difference” refers to an insertion, deletion or substitution of a single amino acid residue on a position of the first sequence, compared to the second sequence; it being understood that two amino acid sequences can contain one, two or more such amino acid differences;
[0287] i) When a nucleotide sequence or amino acid sequence is said to “comprise” another nucleotide sequence or amino acid sequence, respectively, or to “essentially consist of another nucleotide sequence or amino acid sequence, this may mean that the latter nucleotide sequence or amino acid sequence has been incorporated into the firstmentioned nucleotide sequence or amino acid sequence, respectively, but more usually this generally means that the firstmentioned nucleotide sequence or amino acid sequence comprises within its sequence a stretch of nucleotides or amino acid residues, respectively, that has the same nucleotide sequence or amino acid sequence, respectively, as the latter sequence, irrespective of how the firstmentioned sequence has actually been generated or obtained (which may for example be by any suitable method described herein). By means of a non-limiting example, when a Nanobody of the invention is said to comprise a CDR sequence, this may mean that said CDR sequence has been incorporated into the Nanobody of the invention, but more usually this generally means that the Nanobody of the invention contains within its sequence a stretch of amino acid residues with the same amino acid sequence as said CDR sequence, irrespective of how said Nanobody of the invention has been generated or obtained. It should also be noted that when the latter amino acid sequence has a specific biological or structural function, it preferably has essentially the same, a similar or an equivalent biological or structural function in the firstmentioned amino acid sequence (in other words, the firstmentioned amino acid sequence is preferably such that the latter sequence is capable of performing essentially the same, a similar or an equivalent biological or structural function). For example, when a Nanobody of the invention is said to comprise a CDR sequence or framework sequence, respectively, the CDR sequence and framework are preferably capable, in said Nanobody, of functioning as a CDR sequence or framework sequence, respectively. Also, when a nucleotide sequence is said to comprise another nucleotide sequence, the firstmentioned nucleotide sequence is preferably such that, when it is expressed into an expression product (e.g. a polypeptide), the amino acid sequence encoded by the latter nucleotide sequence forms part of said expression product (in other words, that the latter nucleotide sequence is in the same reading frame as the firstmentioned, larger nucleotide sequence).
[0288] j) A nucleic acid sequence or amino acid sequence is considered to be “(in) essentially isolated (form)”—for example, compared to its native biological source and/or the reaction medium or cultivation medium from which it has been obtained—when it has been separated from at least one other component with which it is usually associated in said source or medium, such as another nucleic acid, another protein/polypeptide, another biological component or macromolecule or at least one contaminant, impurity or minor component. In particular, a nucleic acid sequence or amino acid sequence is considered “essentially isolated” when it has been purified at least 2-fold, in particular at least 10-fold, more in particular at least 100-fold, and up to 1000-fold or more. A nucleic acid sequence or amino acid sequence that is “in essentially isolated form” is preferably essentially homogeneous, as determined using a suitable technique, such as a suitable chromatographical technique, such as polyacrylamide-gel electrophoresis;
[0289] k) The term “domain” as used herein generally refers to a globular region of an amino acid sequence (such as an antibody chain, and in particular to a globular region of a heavy chain antibody), or to a polypeptide that essentially consists of such a globular region. Usually, such a domain will comprise peptide loops (for example 3 or 4 peptide loops) stabilized, for example, as a sheet or by disulfide bonds. The term “binding domain” refers to such a domain that is directed against an antigenic determinant (as defined herein);
[0290] l) The term “antigenic determinant” refers to the epitope on the antigen recognized by the antigen-binding molecule (such as a Nanobody or a polypeptide of the invention) and more in particular by the antigen-binding site of said molecule. The terms “antigenic determinant” and “epitope” may also be used interchangeably herein.
[0291] m) An amino acid sequence (such as a Nanobody, an antibody, a polypeptide of the invention, or generally an antigen binding protein or polypeptide or a fragment thereof) that can (specifically) bind to, that has affinity for and/or that has specificity for a specific antigenic determinant, epitope, antigen or protein (or for at least one part, fragment or epitope thereof) is said to be “against” or “directed against” said antigenic determinant, epitope, antigen or protein.
[0292] n) The term “specificity” refers to the number of different types of antigens or antigenic determinants to which a particular antigen-binding molecule or antigen-binding protein (such as a Nanobody or a polypeptide of the invention) molecule can bind. The specificity of an antigen-binding protein can be determined based on affinity and/or avidity. The affinity, represented by the equilibrium constant for the dissociation of an antigen with an antigen-binding protein (K_{D}), is a measure for the binding strength between an antigenic determinant and an antigen-binding site on the antigen-binding protein: the lesser the value of the K_{D}, the stronger the binding strength between an antigenic determinant and the antigen-binding molecule (alternatively, the affinity can also be expressed as the affinity constant (K_{A}), which is 1/K_{D}). As will be clear to the skilled person (for example on the basis of the further disclosure herein), affinity can be determined in a manner known per se, depending on the specific antigen of interest. Avidity is the measure of the strength of binding between an antigen-binding molecule (such as a Nanobody or polypeptide of the invention) and the pertinent antigen. Avidity is related to both the affinity between an antigenic determinant and its antigen binding site on the antigen-binding molecule and the number of pertinent binding sites present on the antigen-binding molecule. Typically, antigen-binding proteins (such as the amino acid sequences, Nanobodies and/or polypeptides of the invention) will bind to their antigen with a dissociation constant (K_{D}) of 10⁻⁵ to 10⁻¹² moles/liter or less, and preferably 10⁻⁷ to 10⁻¹² moles/liter or less and more preferably 10⁻⁸ to 10⁻¹² moles/liter (i.e. with an association constant (K_{A}) of 10⁵ to 10¹² liter/moles or more, and preferably 10⁷ to 10¹² liter/moles or more and more preferably 10⁸ to 10¹² liter/moles). Any K_{D} value greater than 10⁴ mol/liter (or any K_{A} value lower than 10⁴M⁻¹) liters/mol is generally considered to indicate non-specific binding. Preferably, a monovalent immunoglobulin sequence of the invention will bind to the desired antigen with an affinity less than 500 nM, preferably less than 200 nM, more preferably less than 10 nM, such as less than 500 pM. Specific binding of an antigen-binding protein to an antigen or antigenic determinant can be determined in any suitable manner known per se, including, for example, Scatchard analysis and/or competitive binding assays, such as radioimmunoassays (RIA), enzyme immunoassays (EIA) and sandwich competition assays, and the different variants thereof known per se in the art; as well as the other techniques mentioned herein.
   [0293] The dissociation constant may be the actual or apparent dissociation constant, as will be clear to the skilled person. Methods for determining the dissociation constant will be clear to the skilled person, and for example include the techniques mentioned herein. In this respect, it will also be clear that it may not be possible to measure dissociation constants of more then 10⁻⁴ moles/liter or 10⁻³ moles/liter (e,g, of 10⁻² moles/liter). Optionally, as will also be clear to the skilled person, the (actual or apparent) dissociation constant may be calculated on the basis of the (actual or apparent) association constant (K_{A}), by means of the relationship [K_{D}=1/K_{A}].
   [0294] The affinity denotes the strength or stability of a molecular interaction. The affinity is commonly given as by the K_{D}, or dissociation constant, which has units of mol/liter (or M). The affinity can also be expressed as an association constant, K_{A}, which equals 1/K_{D} and has units of (mol/liter)⁻¹ (or M⁻¹). In the present specification, the stability of the interaction between two molecules (such as an amino acid sequence, Nanobody or polypeptide of the invention and its intended target) will mainly be expressed in terms of the K_{D} value of their interaction; it being clear to the skilled person that in view of the relation K_{A}=1/K_{D}, specifying the strength of molecular interaction by its K_{D} value can also be used to calculate the corresponding K_{A} value. The K_{D}-value characterizes the strength of a molecular interaction also in a thermodynamic sense as it is related to the free energy (DG) of binding by the well known relation DG=RT.ln(K_{D}) (equivalently DG.-RT.ln(K_{A})), where R equals the gas constant, T equals the absolute temperature and In denotes the natural logarithm.
   [0295] The K_{D} for biological interactions which are considered meaningful (e.g. specific) are typically in the range of 10⁻¹⁰M (0.1 nM) to 10⁻⁵M (10000 nM). The stronger an interaction is, the lower is its K_{D}.
   [0296] The K_{D} can also be expressed as the ratio of the dissociation rate constant of a complex, denoted as k_{off}, to the rate of its association, denoted kₒₙ (so that K_{D}=k_{off}/kₒₙ and K_{A}=kₒₙ/k_{off}). The off-rate k_{off} has units s⁻¹ (where s is the SI unit notation of second). The on-rate kₒₙ, has units M⁻¹s⁻¹. The on-rate may vary between 10² to about 10⁷ M⁻¹s⁻¹, approaching the diffusion-limited association rate constant for bimolecular interactions. The off-rate is related to the half-life of a given molecular interaction by the relation t_{1/2}=ln(2)/k_{off}. The off-rate may vary between 10⁻⁶ s⁻¹ (near irreversible complex with a t_{1/2} of multiple days) to 1 s⁻¹ (t_{1/2}=0.69 s).
   [0297] The affinity of a molecular interaction between two molecules can be measured via different techniques known per se, such as the well known surface plasmon resonance (SPR) biosensor technique (see for example Ober et al., Intern. Immunology, 13, 1551-1559, 2001) where one molecule is immobilized on the biosensor chip and the other molecule is passed over the immobilized molecule under flow conditions yielding kₒₙ, k_{off} measurements and hence K_{D} (or K_{A}) values. This can for example be performed using the well-known BIACORE instruments.
   [0298] It will also be clear to the skilled person that the measured K_{D} may correspond to the apparent K_{D} if the measuring process somehow influences the intrinsic binding affinity of the implied molecules for example by artefacts related to the coating on the biosensor of one molecule. Also, an apparent K_{D} may be measured if one molecule contains more than one recognition sites for the other molecule. In such situation the measured affinity may be affected by the avidity of the interaction by the two molecules.
   [0299] Another approach that may be used to assess affinity is the 2-step ELISA (Enzyme-Linked Immunosorbent Assay) procedure of Pripet et al. (J. Immunol. Methods, 77, 305-19, 1985). This method establishes a solution phase binding equilibrium measurement and avoids possible artefacts relating to adsorption of one of the molecules on a support such as plastic.
   [0300] However, the accurate measurement of K_{D} may be quite labor-intensive and as consequence, often apparent K_{D}) values are determined to assess the binding strength of two molecules. It should be noted that as long all measurements are made in a consistent way (e.g. keeping the assay conditions unchanged) apparent K_{D} measurements can be used as an approximation of the true K_{D} and hence in the present document K_{D} and apparent K_{D} should be treated with equal importance or relevance. Finally, it should be noted that in many situations the experienced scientist may judge it to be convenient to determine the binding affinity relative to some reference molecule. For example, to assess the binding strength between molecules A and B, one may e.g. use a reference molecule C that is known to bind to B and that is suitably labelled with a fluorophore or chromophore group or other chemical moiety, such as biotin for easy detection in an ELISA or FACS (Fluorescent activated cell sorting) or other format (the fluorophore for fluorescence detection, the chromophore for light absorption detection, the biotin for streptavidin-mediated ELISA detection). Typically, the reference molecule C is kept at a fixed concentration and the concentration of A is varied for a given concentration or amount of B. As a result an IC₅₀ value is obtained corresponding to the concentration of A at which the signal measured for C in absence of A is halved. Provided K_{D ref}, the K_{D} of the reference molecule, is known, as well as the total concentration c_{ref} of the reference molecule, the apparent K_{D} for the interaction A-B can be obtained from following formula: K_{D}=IC₅₀/(1+c_{ref}/K_{D ref}). Note that if c_{ref}<<K_{D ref}, K_{D}≅IC₅₀. Provided the measurement of the IC₅₀ is performed in a consistent way (e.g. keeping c_{ref} fixed) for the binders that are compared, the strength or stability of a molecular interaction can be assessed by the IC₅₀ and this measurement is judged as equivalent to K_{D} or to apparent K_{D} throughout this text.
[0301] o) The half-life of an amino acid sequence, compound or polypeptide of the invention can generally be defined as the time taken for the serum concentration of the amino acid sequence, compound or polypeptide to be reduced by 50%, in vivo, for example due to degradation of the sequence or compound and/or clearance or sequestration of the sequence or compound by natural mechanisms. The in vivo half-life of an amino acid sequence, compound or polypeptide of the invention can be determined in any manner known per se, such as by pharmacokinetic analysis. Suitable techniques will be clear to the person skilled in the art, and may for example generally involve the steps of suitably administering to a warm-blooded animal (i.e. to a human or to another suitable mammal, such as a mouse, rabbit, rat, pig, dog or a primate, for example monkeys from the genus Macaca (such as, and in particular, cynomologus monkeys (Macaca fascicularis) and/or rhesus monkeys (Macaca mulatta)) and baboon (Papio ursinus)) a suitable dose of the amino acid sequence, compound or polypeptide of the invention; collecting blood samples or other samples from said animal; determining the level or concentration of the amino acid sequence, compound or polypeptide of the invention in said blood sample; and calculating, from (a plot of) the data thus obtained, the time until the level or concentration of the amino acid sequence, compound or polypeptide of the invention has been reduced by 50% compared to the initial level upon dosing. Reference is for example made to the Experimental Part below, as well as to the standard handbooks, such as Kenneth, A et al: Chemical Stability of Pharmaceuticals: A Handbook for Pharmacists and Peters et al, Pharmacokinete analysis: A Practical Approach (1996). Reference is also made to “Pharmacokinetics”, M Gibaldi & D Perron, published by Marcel Dekker, 2nd Rev. edition (1982).
   [0302] As will also be clear to the skilled person (see for example pages 6 and 7 of WO 04/003019 and in the further references cited therein), the half-life can be expressed using parameters such as the t1/2-alpha, t1/2-beta and the area under the curve (AUC). In the present specification, an “increase in half-life” refers to an increase in any one of these parameters, such as any two of these parameters, or essentially all three these parameters. As used herein “increase in half-life” or “increased half-life” in particular refers to an increase in the t1/2-beta, either with or without an increase in the t1/2-alpha and/or the AUC or both.
[0303] p) In the context of the present invention, “modulating” or “to modulate” generally means either reducing or inhibiting the activity of, or alternatively increasing the activity of, a target or antigen, as measured using a suitable in vitro, cellular or in vivo assay. In particular, “modulating” or “to modulate” may mean either reducing or inhibiting the activity of, or alternatively increasing a (relevant or intended) biological activity of, a target or antigen, as measured using a suitable in vitro, cellular or in vivo assay (which will usually depend on the target or antigen involved), by at least 1%, preferably at least 5%, such as at least 10% or at least 25%, for example by at least 50%, at least 60%, at least 70%, at least 80%, or 90% or more, compared to activity of the target or antigen in the same assay under the same conditions but without the presence of the construct of the invention.
   [0304] As will be clear to the skilled person, “modulating” may also involve effecting a change (which may either be an increase or a decrease) in affinity, avidity, specificity and/or selectivity of a target or antigen for one or more of its ligands, binding partners, partners for association into a homomultimeric or heteromultimeric form, or substrates; and/or effecting a change (which may either be an increase or a decrease) in the sensitivity of the target or antigen for one or more conditions in the medium or surroundings in which the target or antigen is present (such as pH, ion strength, the presence of co-factors, etc.), compared to the same conditions but without the presence of the construct of the invention. As will be clear to the skilled person, this may again be determined in any suitable manner and/or using any suitable assay known per se, depending on the target or antigen involved.
   [0305] “Modulating” may also mean effecting a change (i.e. an activity as an agonist, as an antagonist or as a reverse agonist, respectively, depending on the target or antigen and the desired biological or physiological effect) with respect to one or more biological or physiological mechanisms, effects, responses, functions, pathways or activities in which the target or antigen (or in which its substrate(s), ligand(s) or pathway(s) are involved, such as its signalling pathway or metabolic pathway and their associated biological or physiological effects) is involved. Again, as will be clear to the skilled person, such an action as an agonist or an antagonist may be determined in any suitable manner and/or using any suitable (in vitro and usually cellular or in assay) assay known per se, depending on the target or antigen involved. In particular, an action as an agonist or antagonist may be such that an intended biological or physiological activity is increased or decreased, respectively, by at least 1%, preferably at least 5%, such as at least 10% or at least 25%, for example by at least 50%, at least 60%, at least 70%, at least 80%, or 90% or more, compared to the biological or physiological activity in the same assay under the same conditions but without the presence of the construct of the invention.
   [0306] Modulating may for example also involve allosteric modulation of the target or antigen; and/or reducing or inhibiting the binding of the target or antigen to one of its substrates or ligands and/or competing with a natural ligand, substrate for binding to the target or antigen. Modulating may also involve activating the target or antigen or the mechanism or pathway in which it is involved. Modulating may for example also involve effecting a change in respect of the folding or confirmation of the target or antigen, or in respect of the ability of the target or antigen to fold, to change its confirmation (for example, upon binding of a ligand), to associate with other (sub)units, or to disassociate. Modulating may for example also involve effecting a change in the ability of the target or antigen to transport other compounds or to serve as a channel for other compounds (such as ions).
   [0307] Modulating may be reversible or irreversible, but for pharmaceutical and pharmacological purposes will usually be in a reversible manner.
[0308] q) In respect of a target or antigen, the term “interaction site” on the target or antigen means a site, epitope, antigenic determinant, part, domain or stretch of amino acid residues on the target or antigen that is a site for binding to a ligand, receptor or other binding partner, a catalytic site, a cleavage site, a site for allosteric interaction, a site involved in multimerisation (such as homomerization or heterodimerization) of the target or antigen; or any other site, epitope, antigenic determinant, part, domain or stretch of amino acid residues on the target or antigen that is involved in a biological action or mechanism of the target or antigen. More generally, an “interaction site” can be any site, epitope, antigenic determinant, part, domain or stretch of amino acid residues on the target or antigen to which an amino acid sequence or polypeptide of the invention can bind such that the target or antigen (and/or any pathway, interaction, signalling, biological mechanism or biological effect in which the target or antigen is involved) is modulated (as defined herein).
[0309] r) An amino acid sequence or polypeptide is said to be “specific for” a first target or antigen compared to a second target or antigen when is binds to the first antigen with an affinity (as described above, and suitably expressed as a K_{D} value, K_{A} value, K_{off} rate and/or Kₒₙ rate) that is at least 10 times, such as at least 100 times, and preferably at least 1000 times, and up to 10.000 times or more better than the affinity with which said amino acid sequence or polypeptide binds to the second target or polypeptide. For example, the first antigen may bind to the target or antigen with a K_{D} value that is at least 10 times less, such as at least 100 times less, and preferably at least 1000 times less, such as 10.000 times less or even less than that, than the K_{D} with which said amino acid sequence or polypeptide binds to the second target or polypeptide. Preferably, when an amino acid sequence or polypeptide is “specific for” a first target or antigen compared to a second target or antigen, it is directed against (as defined herein) said first target or antigen, but not directed against said second target or antigen.
[0310] s) The terms “cross-block”, “cross-blocked” and “cross-blocking” are used interchangeably herein to mean the ability of an amino acid sequence or other binding agents (such as a polypeptide of the invention) to interfere with the binding of other amino acid sequences or binding agents of the invention to a given target. The extend to which an amino acid sequence or other binding agent of the invention is able to interfere with the binding of another amino acid sequence or other binding agent to said target, and therefore, whether it can be said to cross-block according to the invention, can be determined using competition binding assays (also referred to herein as “cross-blocking assay”). One particularly suitable quantitative cross-blocking assay uses a Biacore instrument which can measure the extent of interactions using surface plasmon resonance technology. Another suitable quantitative cross-blocking assay uses an ELISA-based approach to measure competition between amino acid sequences or other binding agents in terms of their binding to the target.
   [0311] The following generally describes a suitable Biacore assay for determining whether an amino acid sequence or other binding agent cross-blocks or is capable of cross-blocking according to the invention. It will be appreciated that the assay can be used with any of the amino acid sequences or other binding agents described herein. The Biacore instrument (for example the Biacore 3000) is operated in line with the manufacturer's recommendations. Thus, in one cross-blocking assay, the target protein is coupled to a CM5 Biacore chip using standard amine coupling chemistry to generate a surface that is coated with the target. Typically 200-800 resonance units of the target would be coupled to the chip (an amount that gives easily measurable levels of binding but that is readily saturable by the concentrations of test reagent being used). Two test amino acid sequences (termed A* and B*) or other binding agents to be assessed for their ability to cross-block each other are mixed at a one to one molar ratio of binding sites in a suitable buffer to create the test mixture. When calculating the concentrations on a binding site basis, the molecular weight of an amino acid sequence or other binding agent is assumed to be the total molecular weight of the amino acid sequence or other binding agent divided by the number of target binding sites on that amino acid sequence or other binding agent. The concentration of each amino acid sequence or other binding agent in the test mix should be high enough to readily saturate the binding sites for that amino acid sequence or other binding agent on the target molecules captured on the Biacore chip. The amino acid sequences or other binding agents in the mixture are at the same molar concentration (on a binding site basis) which would typically be between 1.00 and 1.5 micromolar (on a binding site basis). Separate solutions containing A* alone and B* alone are also prepared. A* and B* in these solutions should be in the same buffer and at the same concentration as in the test mix. The test mixture is passed over the target-coated Biacore chip and the total amount of binding recorded. The chip is then treated in such a way as to remove the bound amino acid sequences or other binding agents without damaging the chip-bound target. Typically this is done by treating the chip with 30 mM HCl for 60 seconds. The solution of A* alone is then passed over the target-coated surface and the amount of binding recorded. The chip is again treated to remove all of the bound amino acid sequences or other binding agents without damaging the chip-bound target. The solution of B* alone is then passed over the target-coated surface and the amount of binding recorded. The maximum theoretical binding of the mixture of A* and B* is next calculated, and is the sum of the binding of each amino acid sequence or other binding agent when passed over the target surface alone. If the actual recorded binding of the mixture is less than this theoretical maximum then the two amino acid sequences or other binding agents are cross-blocking each other. Thus, in general, a cross-blocking amino acid sequence or other binding agent according to the invention is one which will bind to the target in the above Biacore cross-blocking assay such that during the assay and in the presence of a second amino acid sequence or other binding agent of the invention the recorded binding is between 80% and 0.1% (e.g. 80% to 4%) of the maximum theoretical binding, specifically between 75% and 0.1% (e.g. 75% to 4%) of the maximum theoretical binding, and more specifically between 70% and 0.1% (e.g. 70% to 4%) of maximum theoretical binding (as just defined above) of the two amino acid sequences or binding agents in combination. The Biacore assay described above is a primary assay used to determine if amino acid sequences or other binding agents cross-block each other according to the invention. On rare occasions particular amino acid sequences or other binding agents may not bind to target coupled via amine chemistry to a CM5 Biacore chip (this usually occurs when the relevant binding site on target is masked or destroyed by the coupling to the chip). In such cases cross-blocking can be determined using a tagged version of the target, for example a N-terminal His-tagged version. In this particular format, an anti-His amino acid sequence would be coupled to the Biacore chip and then the His-tagged target would be passed over the surface of the chip and captured by the anti-His amino acid sequence. The cross blocking analysis would be carried out essentially as described above, except that after each chip regeneration cycle, new His-tagged target would be loaded back onto the anti-His amino acid sequence coated surface. In addition to the example given using N-terminal His-tagged target, C-terminal His-tagged target could alternatively he used. Furthermore, various other tags and tag binding protein combinations that are known in the art could be used for such a cross-blocking analysis (e.g. HA tag with anti-HA antibodies; FLAG tag with anti-FLAG antibodies; biotin tag with streptavidin). The following generally describes an ELISA assay for determining whether an amino acid sequence or other binding agent directed against a target cross-blocks or is capable of cross-blocking as defined herein. It will be appreciated that the assay can be used with any of the amino acid sequences (or other binding agents such as polypeptides of the invention) described herein. The general principal of the assay is to have an amino acid sequence or binding agent that is directed against the target coated onto the wells of an ELISA plate. An excess amount of a second, potentially cross-blocking, anti-target amino acid sequence or other binding agent is added in solution (i.e. not bound to the ELISA plate). A limited amount of the target is then added to the wells. The coated amino acid sequence or other binding agent and the amino acid sequence or other binding agent in solution compete for binding of the limited number of target molecules. The plate is washed to remove excess target that has not been bound by the coated amino acid sequence or other binding agent and to also remove the second, solution phase amino acid sequence or other binding agent as well as any complexes formed between the second, solution phase amino acid sequence or other binding agent and target. The amount of bound target is then measured using a reagent that is appropriate to detect the target. An amino acid sequence or other binding agent in solution that is able to cross-block the coated amino acid sequence or other binding agent will be able to cause a decrease in the number of target molecules bound to the coated amino acid sequence or other binding agent relative to the number of target molecules bound to the coated amino acid sequence or other binding agent in the absence of the second, solution phase, amino acid sequence or other binding agent. In the instance where the first amino acid sequence or other binding agent, e.g. an Ab-X, is chosen to be the immobilized amino acid sequence or other binding agent, it is coated onto the wells of the ELISA plate, after which the plates are blocked with a suitable blocking solution to minimize non-specific binding of reagents that are subsequently added. An excess amount of the second amino acid sequence or other binding agent, i.e. Ab-Y, is then added to the ELISA plate such that the moles of Ab-Y target binding sites per well are at least 10 fold higher than the moles of Ab-X target binding sites that were used, per well, during the coating of the ELISA plate. Target is then added such that the moles of target added per well are at least 25-fold lower than the moles of Ab-X target binding sites that were used for coating each well. Following a suitable incubation period the ELISA plate is washed and a reagent for detecting the target is added to measure the amount of target specifically bound by the coated anti-target amino acid sequence or other binding agent (in this case Ab-X). The background signal for the assay is defined as the signal obtained in wells with the coated amino acid sequence or other binding agent (in this case Ab-X), second solution phase amino acid sequence or other binding agent (in this case Ab-Y), target buffer only (i.e. without target added) and target detection reagents. The positive control signal for the assay is defined as the signal obtained in wells with the coated amino acid sequence or other binding agent (in this case Ab-X), second solution phase amino acid sequence or other binding agent buffer only (i.e. without second solution phase amino acid sequence or other binding agent added), target and target detection reagents. The ELISA assay may be run in such a manner so as to have the positive control signal be at least 6 times the background signal. To avoid any artefacts (e.g. significantly different affinities between Ab-X and

[0312] Ab-Y for the target) resulting from the choice of which amino acid sequence to use as the coating amino acid sequence or other binding agent and which to use as the second (competitor) amino acid sequence or other binding agent, the cross-blocking assay may to be run in two formats: 1) format 1 is where Ab-X is the amino acid sequence that is coated onto the ELISA plate and Ab-Y is the competitor amino acid sequence that is in solution and 2) format 2 is where Ab-Y is the amino acid sequence that is coated onto the ELISA plate and Ab-X is the competitor amino acid sequence that is in solution. Ab-X and Ab-Y are defined as cross-blocking if, either in format 1 or in format 2, the solution phase anti-target amino acid sequence or other binding agent is able to cause a reduction of between 60% and 100%, specifically between 70% and 100%, and more specifically between 80% and 100%, of the target detection signal {i.e. the amount of target bound by the coated amino acid sequence) as compared to the target detection signal obtained in the absence of the solution phase anti- target amino acid sequence or other binding agent (i.e. the positive control wells).
[0313] t) As further described herein, the total number of amino acid residues in a Nanobody can be in the region of 110-120, is preferably 112-115, and is most preferably 113. It should however be noted that parts, fragments, analogs or derivatives (as further described herein) of a Nanobody are not particularly limited as to their length and/or size, as long as such parts, fragments, analogs or derivatives meet the further requirements outlined herein and are also preferably suitable for the purposes described herein;
[0314] u) The amino acid residues of a Nanobody are numbered according to the general numbering for V_{H} domains given by Kabat et al. (“Sequence of proteins of immunological interest”, US Public Health Services, NIH Bethesda, Md., Publication No. 91), as applied to V_{HH} domains from Camelids in the article of Riechmann and Muyldermans, J. Immunol. Methods 2000 Jun. 23; 240 (1-2): 185-195 (see for example FIG. 2 of this publication); or referred to herein. According to this numbering, FR1 of a Nanobody comprises the amino acid residues at positions 1-30, CDR1 of a Nanobody comprises the amino acid residues at positions 31-35, FR2 of a Nanobody comprises the amino acids at positions 36-49, CDR2 of a Nanobody comprises the amino acid residues at positions 50-65, FR3 of a Nanobody comprises the amino acid residues at positions 66-94, CDR3 of a Nanobody comprises the amino acid residues at positions 95-102, and FR4 of a Nanobody comprises the amino acid residues at positions 103-113. [In this respect, it should be noted that—as is well known in the art for V_{H} domains and for V_{HH} domains—the total number of amino acid residues in each of the CDR's may vary and may not correspond to the total number of amino acid residues indicated by the Kabat numbering (that is, one or more positions according to the Kabat numbering may not be occupied in the actual sequence, or the actual sequence may contain more amino acid residues than the number allowed for by the Kabat numbering). This means that, generally, the numbering according to Kabat may or may not correspond to the actual numbering of the amino acid residues in the actual sequence. Generally, however, it can be said that, according to the numbering of Kabat and irrespective of the number of amino acid residues in the CDR's, position 1 according to the Kabat numbering corresponds to the start of FR1 and vice versa, position 36 according to the Kabat numbering corresponds to the start of FR2 and vice versa, position 66 according to the Kabat numbering corresponds to the start of FR3 and vice versa, and position 103 according to the Kabat numbering corresponds to the start of FR4 and vice versa.].
   [0315] Alternative methods for numbering the amino acid residues of V_{H} domains, which methods can also be applied in an analogous manner to V_{HH} domains from Camelids and to Nanobodies, are the method described by Chothia et al. (Nature 342, 877-883 (1989)), the so-called “AbM definition” and the so-called “contact definition”. However, in the present description, claims and figures, the numbering according to Kabat as applied to V_{HH} domains by Riechmann and Muyldermans will be followed, unless indicated otherwise; and
[0316] v) The Figures, Sequence Listing and the Experimental Part/Examples are only given to further illustrate the invention and should not be interpreted or construed as limiting the scope of the invention and/or of the appended claims in any way, unless explicitly indicated otherwise herein.

[0317] For a general description of heavy chain antibodies and the variable domains thereof, reference is inter alia made to the prior art cited herein, to the review article by Muyldennans in Reviews in Molecular Biotechnology 74(2001), 277-302; as well as to the following patent applications, which are mentioned as general background art: WO 94/04678, WO 95/04079 and WO 96/34103 of the Vrije Universiteit Brussel; WO 94/25591, WO 99/37681, WO 00/40968, WO 00/43507, WO 00/65057, WO 01/40310, WO 01/44301, EP 1134231 and WO 02/48193 of Unilever; WO 97/49805, WO 01/21817, WO 03/035694, WO 03/054016 and WO 03/055527 of the Vlaams Instituut voor Biotechnologie (VIB); WO 03/050531 of Algonomics N.V. and Ablynx N.V.; WO 01/90190 by the National Research Council of Canada; WO 03/025020 (=EP 1 433 793) by the Institute of Antibodies; as well as WO 04/041867, WO 04/041862, WO 04/041865, WO 04/041863, WO 04/062551, WO 05/044858, WO 06/40153, WO 06/079372, WO 06/122786, WO 06/122787 and WO 06/122825, by Ablynx N.V. and the further published patent applications by Ablynx N.V. Reference is also made to the further prior art mentioned in these applications, and in particular to the list of references mentioned on pages 41-43 of the International application WO 06/040153, which list and references are incorporated herein by reference.

[0318] In accordance with the terminology used in the art (see the above references), the variable domains present in naturally occurring heavy chain antibodies will also be referred to as “V_{HH} domains”, in order to distinguish them from the heavy chain variable domains that are present in conventional 4-chain antibodies (which will be referred to hereinbelow as “V_{H} domains”) and from the light chain variable domains that are present in conventional 4-chain antibodies (which will be referred to hereinbelow as “V_{L} domains”).

[0319] As mentioned in the prior art referred to above, V_{HH} domains have a number of unique structural characteristics and functional properties which make isolated V_{HH} domains (as well as Nanobodies based thereon, which share these structural characteristics and functional properties with the naturally occurring V_{HH} domains) and proteins containing the same highly advantageous for use as functional antigen-binding domains or proteins. In particular, and without being limited thereto, V_{HH} domains (which have been “designed” by nature to functionally bind to an antigen without the presence of, and without any interaction with, a light chain variable domain) and Nanobodies can function as a single, relatively small, functional antigen-binding structural unit, domain or protein. This distinguishes the V_{HH} domains from the V_{H} and V_{L} domains of conventional 4-chain antibodies, which by themselves are generally not suited for practical application as single antigen-binding proteins or domains, but need to be combined in some form or another to provide a functional antigen-binding unit (as in for example conventional antibody fragments such as Fab fragments; in ScFv's fragments, which consist of a V_{H} domain covalently linked to a V_{L} domain).

[0320] Because of these unique properties, the use of V_{HH} domains and Nanobodies as single antigen-binding proteins or as antigen-binding domains (i.e. as part of a larger protein or polypeptide) offers a number of significant advantages over the use of conventional V_{H} and V_{L} domains, scFv's or conventional antibody fragments (such as Fab- or F(ab′)2-fragments):
[0321] only a single domain is required to bind an antigen with high affinity and with high selectivity, so that there is no need to have two separate domains present, nor to assure that these two domains are present in the right spacial conformation and configuration (i.e. through the use of especially designed linkers, as with scFv's);
[0322] V_{HH} domains and Nanobodies can be expressed from a single gene and require no post-translational folding or modifications;
[0323] V_{HH} domains and Nanobodies can easily be engineered into multivalent and multispecific formats (as further discussed herein);
[0324] V_{HH} domains and Nanobodies are highly soluble and do not have a tendency to aggregate (as with the mouse-derived “dAb's” described by Ward et al., Nature, Vol. 341, 1989, p. 544);
[0325] V_{HH} domains and Nanobodies are highly stable to heat, pH, proteases and other denaturing agents or conditions (see for example Ewert et al, supra);
[0326] V_{HH} domains and Nanobodies are easy and relatively cheap to prepare, even on a scale required for production. For example, V_{HH} domains, Nanobodies and proteins/polypeptides containing the same can be produced using microbial fermentation (e.g. as further described below) and do not require the use of mammalian expression systems, as with for example conventional antibody fragments;
[0327] V_{HH} domains and Nanobodies are relatively small (approximately 15 kDa, or 10 times smaller than a conventional IgG) compared to conventional 4-chain antibodies and antigen-binding fragments thereof, and therefore show high(er) penetration into tissues (including but not limited to solid tumors and other dense tissues) than such conventional 4-chain antibodies and antigen-binding fragments thereof;
[0328] V_{HH} domains and Nanobodies can show so-called cavity-binding properties (inter alia due to their extended CDR3 loop, compared to conventional V_{H} domains) and can therefore also access targets and epitopes not accessable to conventional 4-chain antibodies and antigen-binding fragments thereof. For example, it has been shown that V_{HH} domains and Nanobodies can inhibit enzymes (see for example WO 97/49805; Transue et al., Proteins 1998 Sep. 1; 32(4): 515-22; Lauwereys et al., EMBO J. 1998 Jul. 1; 17(13): 3512-20).

[0329] In a specific and preferred aspect, the invention provides Nanobodies against VEGF, and in particular Nanobodies against VEGF from a warm-blooded animal, and more in particular Nanobodies against VEGF from a mammal, and especially Nanobodies against human VEGF; as well as proteins and/or polypeptides comprising at least one such Nanobody.

[0330] In particular, the invention provides Nanobodies against VEGF, and proteins and/or polypeptides comprising the same, that have improved therapeutic and/or pharmacological properties and/or other advantageous properties (such as, for example, improved ease of preparation and/or reduced costs of goods), compared to conventional antibodies against VEGF or fragments thereof, compared to constructs that could be based on such conventional antibodies or antibody fragments (such as Fab′ fragments, F(ab′)₂ fragments, ScFv constructs, “diabodies” and other multispecific constructs (see for example the review by Holliger and. Hudson, Nat Biotechnol. 2005 September; 23(9):1126-36)), and also compared to the so-called “dAb's” or similar (single) domain antibodies that may be derived from variable domains of conventional antibodies. These improved and advantageous properties will become clear from the further description herein, and for example include, without limitation, one or more of:
[0331] increased affinity and/or avidity for VEGF, either in a monovalent format, in a multivalent format (for example in a bivalent format) and/or in a multispecific format (for example one of the multispecific formats described hereinbelow);
[0332] better suitability for formatting in a multivalent format (for example in a bivalent format);
[0333] better suitability for formatting in a multispecific format (for example one of the multi specific formats described hereinbelow);
[0334] improved suitability or susceptibility for “humanizing” substitutions (as defined herein);
[0335] less immunogenicity, either in a monovalent format, in a multivalent format (for example in a bivalent format) and/or in a multispecific format (for example one of the multispecific formats described hereinbelow);
[0336] increased stability, either in a monovalent format, in a multivalent format (for example in a bivalent format) and/or in a multispecific format (for example one of the multispecific formats described hereinbelow);
[0337] increased specificity towards VEGF, either in a monovalent format, in a multivalent format (for example in a bivalent format) and/or in a multispecific format (for example one of the multispecific formats described hereinbelow);
[0338] decreased or where desired increased cross-reactivity with VEGF from different species;
   and/or
[0339] one or more other improved properties desirable for pharmaceutical use (including prophylactic use and/or therapeutic use) and/or for diagnostic use (including but not limited to use for imaging purposes), either in a monovalent format, in a multivalent format (for example in a bivalent format) and/or in a multispecific format (for example one of the multispecific formats described hereinbelow).

[0340] As generally described herein for the amino acid sequences of the invention, the

[0341] Nanobodies of the invention are preferably in essentially isolated form (as defined herein), or form part of a protein or polypeptide of the invention (as defined herein), which may comprise or essentially consist of one or more Nanobodies of the invention and which may optionally further comprise one or more further amino acid sequences (all optionally linked via one or more suitable linkers). For example, and without limitation, the one or more amino acid sequences of the invention may be used as a binding unit in such a protein or polypeptide, which may optionally contain one or more further amino acid sequences that can serve as a binding unit (i.e. against one or more other targets than VEGF), so as to provide a monovalent, multivalent or multispecific polypeptide of the invention, respectively, all as described herein. In particular, such a protein or polypeptide may comprise or essentially consist of one or more Nanobodies of the invention and optionally one or more (other) Nanobodies (i.e. directed against other targets than VEGF), all optionally linked via one or more suitable linkers, so as to provide a monovalent, multivalent or multispecific Nanobody construct, respectively, as further described herein. Such proteins or polypeptides may also be in essentially isolated form (as defined herein).

[0342] In a Nanobody of the invention, the binding site for binding against VEGF is preferably formed by the CDR sequences. Optionally, a Nanobody of the invention may also, and in addition to the at least one binding site for binding against VEGF, contain one or more further binding sites for binding against other antigens, proteins or targets. For methods and positions for introducing such second binding sites, reference is for example made to Keck and Huston, Biophysical Journal, 71, October 1996, 2002-2011; EP 0 640 130; WO 06/07260.

[0343] As generally described herein for the amino acid sequences of the invention, when a

[0344] Nanobody of the invention (or a polypeptide of the invention comprising the same) is intended for administration to a subject (for example for therapeutic and/or diagnostic purposes as described herein), it is preferably directed against human VEGF; whereas for veterinary purposes, it is preferably directed against VEGF from the species to be treated. Also, as with the amino acid sequences of the invention, a Nanobody of the invention may or may not be cross-reactive (i.e. directed against VEGF from two or more species of mammal, such as against human VEGF and VEGF from at least one of the species of mammal mentioned herein).

[0345] Also, again as generally described herein for the amino acid sequences of the invention, the Nanobodies of the invention may generally be directed against any antigenic determinant, epitope, part, domain, subunit or confirmation (where applicable) of VEGF. However, it is generally assumed and preferred that the Nanobodies of the invention (and polypeptides comprising the same) are directed against the binding site for VEGFR-1 and/or the binding site for VEGFR-2. As already described herein, the amino acid sequence and structure of a Nanobody can be considered - without however being limited thereto—to be comprised of four framework regions or “FR's” (or sometimes also referred to as “FW's”), which are referred to in the art and herein as “Framework region 1” or “FR1”; as “Framework region 2” or “FR2”; as “Framework region 3” or “FR3”; and as “Framework region 4” or “FR4”, respectively; which framework regions are interrupted by three complementary determining regions or “CDR's”, which are referred to in the art as “Complementarity Determining Region 1” or “CDR1”; as “Complementarity Determining Region 2” or “CDR.2”; and as “Complementarity Determining Region 3” or “CDR3”, respectively. Some preferred framework sequences and CDR's (and combinations thereof) that are present in the Nanobodies of the invention are as described herein. Other suitable CDR sequences can be obtained by the methods described herein.

[0346] According to a non-limiting but preferred aspect of the invention, (the CDR sequences present in) the Nanobodies of the invention are such that:
[0347] the Nanobodies can bind to VEGF with a dissociation constant (K_{D}) of 10⁻⁵ to 10⁻¹² moles/liter or less, and preferably 10⁻⁷ to 10⁻¹² moles/liter or less and more preferably 10⁻⁸ to 10⁻¹² moles/liter (i.e. with an association constant (K_{A}) of 10⁵ to 10¹² liter/moles or more, and preferably 10⁷ to 10¹² liter/moles or more and more preferably 10⁸ to 10¹² liter/moles);
   and/or such that:
[0348] the Nanobodies can bind to VEGF with a kₒₙ-rate of between 10² M⁻¹S⁻¹ to about 10⁷ M⁻¹s⁻¹, preferably between 10³ M⁻¹s⁻¹ and 10⁷ M⁻¹s⁻¹, more preferably between 10⁴ M⁻¹s⁻¹ and 10⁷ M⁻¹s⁻¹, such as between 10⁵ M⁻¹s⁻¹ and 10⁷ M⁻¹s⁻¹;
   and/or such that they:
[0349] the Nanobodies can bind to VEGF with a k_{off} rate between 1 s⁻¹ (t_{1/2}=0.69 s) and 10⁻⁶ s⁻¹ (providing a near irreversible complex with a t_{1/2} of multiple days), preferably between 10⁻² s⁻¹ and 10⁻⁶ s⁻¹, more preferably between 10⁻³ s⁻¹ and 10⁻⁶ s⁻¹, such as between 10⁻⁴ s⁻¹ and 10⁻⁶ s⁻¹.

[0350] Preferably, (the CDR sequences present in) the Nanobodies of the invention are such that: a monovalent Nanobody of the invention (or a polypeptide that contains only one

[0351] Nanobody of the invention) is preferably such that it will bind to VEGF with an affinity less than 500 nM, preferably less than 200 nM, more preferably less than 10 nM, such as less than 500 pM.

[0352] The affinity of the Nanobody of the invention against VEGF can be determined in a manner known per se, for example using the general techniques for measuring K_{D}, K_{A}, k_{off} or kₒₙ mentioned herein, as well as some of the specific assays described herein.

[0353] Some preferred IC50 values for binding of the Nanobodies of the invention (and of polypeptides comprising the same) to VEGF will become clear from the further description and examples herein.

[0354] In a preferred but non-limiting aspect, the invention relates to a Nanobody (as defined herein) against VEGF, which consists of 4 framework regions (FR1 to FR4 respectively) and 3 complementarity determining regions (CDR1 to CDR3 respectively), in which:
[0355] CDR1 is chosen from the group consisting of:
[0356] a) the amino acid sequences of SEQ ID NO's: 171-215;
[0357] b) amino acid sequences that have at least 80% amino acid identity with at least one of the amino acid sequences of SEQ ID NO's: 171-215;
[0358] c) amino acid sequences that have 3, 2, or 1 amino acid difference with at least one of the amino acid sequences of SEQ ID NO's: 171-215; and/or
[0359] CDR2 is chosen from the group consisting of:
[0360] d) the amino acid sequences of SEQ ID NO's: 261-305;
[0361] e) amino acid sequences that have at least 80% amino acid identity with at least one of the amino acid sequences of SEQ ID NO's: 261-305;
[0362] f) amino acid sequences that have 3, 2, or 1 amino acid difference with at least one of the amino acid sequences of SEQ ID NO's: 261-305; and/or
[0363] CDR3 is chosen from the group consisting of:
[0364] g) the amino acid sequences of SEQ ID NO's: 351-395;
[0365] h) amino acid sequences that have at least 80% amino acid identity with at least one of the amino acid sequences of SEQ ID NO's: 351-395;
[0366] i) amino acid sequences that have 3, 2, or 1 amino acid difference with at least one of the amino acid sequences of SEQ ID NO' s: 351-395;
   or any suitable fragment of such an amino acid sequence.

[0367] In particular, according to this preferred but non-limiting aspect, the invention relates to a Nanobody (as defined herein) against VEGF, which consists of 4 framework regions (FR1 to FR4 respectively) and 3 complementarity determining regions (CDR1 to CDR3 respectively), in which:
[0368] CDR1 is chosen from the group consisting of:
[0369] a) the amino acid sequences of SEQ ID NO's: 171-215;
[0370] b) amino acid sequences that have at least 80% amino acid identity with at least one of the amino acid sequences of SEQ ID NO's: 171-215;
[0371] c) amino acid sequences that have 3, 2, or 1 amino acid difference with at least one of the amino acid sequences of SEQ ID NO's: 171-215;
   and
[0372] CDR2 is chosen from the group consisting of:
[0373] d) the amino acid sequences of SEQ ID NO's: 261-305;
[0374] e) amino acid sequences that have at least 80% amino acid identity with at least one of the amino acid sequences of SEQ ID NO's: 261-305;
[0375] f) amino acid sequences that have 3, 2, or 1 amino acid difference with at least one of the amino acid sequences of SEQ ID NO's: 261-305;
   and
[0376] CDR3 is chosen from the group consisting of:
[0377] g) the amino acid sequences of SEQ ID NO's: 351-395;
[0378] h) amino acid sequences that have at least 80% amino acid identity with at least one of the amino acid sequences of SEQ ID NO's: 351-395;
[0379] i) amino acid sequences that have 3, 2, or 1 amino acid difference with at least one of the amino acid sequences of SEQ ID NO's: 351-395;
   or any suitable fragment of such an amino acid sequences.

[0380] As generally mentioned herein for the amino acid sequences of the invention, when a Nanobody of the invention contains one or more CDR1 sequences according to b) and/or c):
[0381] i) any amino acid substitution in such a CDR according to b) and/or c) is preferably, and compared to the corresponding CDR according to a), a conservative amino acid substitution (as defined herein);
   and/or
[0382] ii) the CDR according to b) and/or c) preferably only contains amino acid substitutions, and no amino acid deletions or insertions, compared to the corresponding CDR according to a);
   and/or
[0383] iii) the CDR according to b) and/or c) may be a CDR that is derived from a CDR according to a) by means of affinity maturation using one or more techniques of affinity maturation known per se.

[0384] Similarly, when a Nanobody of the invention contains one or more CDR2 sequences according to e) and/or f):
[0385] i) any amino acid substitution in such a CDR according to e) and/or f) is preferably, and compared to the corresponding CDR according to d), a conservative amino acid substitution (as defined herein);
   and/or
[0386] ii) the CDR according to e) and/or f) preferably only contains amino acid substitutions, and no amino acid deletions or insertions, compared to the corresponding CDR according to d);
   and/or
[0387] iii) the CDR according to e) and/or f) may be a CDR that is derived from a CDR according to d) by means of affinity maturation using one or more techniques of affinity maturation known per se.

[0388] Also, similarly, when a Nanobody of the invention contains one or more CDR3 sequences according to h) and/or i):
[0389] i) any amino acid substitution in such a CDR according to h) and/or i) is preferably, and compared to the corresponding CDR according to g), a conservative amino acid substitution (as defined herein);
   and/or
[0390] ii) the CDR according to h) and/or i) preferably only contains amino acid substitutions, and no amino acid deletions or insertions, compared to the corresponding CDR according to g);
   and/or
[0391] iii) the CDR according to h) and/or i) may be a CDR that is derived from a CDR according to g) by means of affinity maturation using one or more techniques of affinity maturation known per se.

[0392] It should be understood that the last three paragraphs generally apply to any Nanobody of the invention that comprises one or more CDR1 sequences, CDR2 sequences and/or CDR3 sequences according to b), c), e), f), h) or i), respectively.

[0393] Of the Nanobodies of the invention, Nanobodies comprising one or more of the CDR's explicitly listed above are particularly preferred; Nanobodies comprising two or more of the CDR's explicitly listed above are more particularly preferred; and Nanobodies comprising three of the CDR's explicitly listed above are most particularly preferred.

[0394] Some particularly preferred, but non-limiting combinations of CDR sequences, as well as preferred combinations of CDR sequences and framework sequences, are mentioned in Table A-1 below, which lists the CDR sequences and framework sequences that are present in a number of preferred (but non-limiting) Nanobodies of the invention. As will be clear to the skilled person, a combination of CDR1, CDR2 and CDR3 sequences that occur in the same clone (i.e. CDR1, CDR2 and CDR3 sequences that are mentioned on the same line in Table A-1) will usually be preferred (although the invention in its broadest sense is not limited thereto, and also comprises other suitable combinations of the CDR sequences mentioned in Table A-1). Also, a combination of CDR sequences and framework sequences that occur in the same clone (i.e. CDR sequences and framework sequences that are mentioned on the same line in Table A-1) will usually be preferred (although the invention in its broadest sense is not limited thereto, and also comprises other suitable combinations of the CDR sequences and framework sequences mentioned in Table A-1, as well as combinations of such CDR sequences and other suitable framework sequences, e.g. as further described herein.).

[0395] Also, in the Nanobodies of the invention that comprise the combinations of CDR's mentioned in Table A-1, each CDR can be replaced by a CDR chosen from the group consisting of amino acid sequences that have at least 80%, preferably at least 90%, more preferably at least 95%, even more preferably at least 99% sequence identity (as defined herein) with the mentioned CDR's; in which:
[0396] i) any amino acid substitution in such a CDR is preferably, and compared to the corresponding CDR sequence mentioned in Table A-1, a conservative amino acid substitution (as defined herein);
   and/or
[0397] ii) any such CDR sequence preferably only contains amino acid substitutions, and no amino acid deletions or insertions, compared to the corresponding CDR sequence mentioned in Table A-1;
   and/or
[0398] iii) any such CDR sequence is a CDR that is derived by means of a technique for affinity maturation known per se, and in particular starting from the corresponding CDR sequence mentioned in Table A-1.

[0399] However, as will be clear to the skilled person, the (combinations of) CDR sequences, as well as (the combinations of) CDR sequences and framework sequences mentioned in Table A-1 will generally be preferred.

TABLE A-1

Preferred combinations of CDR sequences, preferred
combinations of framework sequences, and preferred
combinations of framework and CDR sequences.
(“ID” refers to the SEQ ID NO in the attached sequence
listing)

| | | | | | | | | |
|---|---|---|---|---|---|---|---|---|
| Clone | ID | FR1 | ID | CDR 1 | ID | FR2 | ID | CDR 2 |

| | | | | | | | | |
|---|---|---|---|---|---|---|---|---|
| PMP1A1 | 125 | EVQLVESGGGL | 171 | SLAMG | 216 | WFRQAPG | 261 | VVSGSGGTT |
| | | VQAGGSLRLSC | | | | KDREFVV | | KYADSVKG |
| | | AASGRTFS | | | | | | |
| PMP19C6 | 127 | KVQLVESGGGL | 172 | DNVMG | 217 | WFRQAAG | 262 | HISRGGSRT |
| | | VQAGGSLRLSC | | | | KEREFVA | | EYADSVKG |
| | | AASGRSFS | | | | | | |
| PMP1D1 | 128 | EVQLVESGGGL | 173 | SARMG | 216 | WFRQCPG | 263 | AISWSNDITY |
| | | VQVGGSLRLSC | | | | KEREFVA | | YEDSVKG |
| | | AASGRTFS | | | | | | |
| PMP1D10 | 129 | EVQLVESGGGL | 174 | SSWMY | 219 | WVRQAPG | 264 | SISPGGLFPY |
| | | VQPGGSLHLAC | | | | KGLEWVS | | YVDSVKG |
| | | AVSGFTMS | | | | | | |
| PMP25H1 | 130 | EVQLVESGGGL | 175 | SYSMI | 220 | WVRQAPG | 265 | EISSGGGWT |
| | | VQPGGSLRLSC | | | | KGLEWVS | | SYADSVKG |
| | | AASGFTFS | | | | | | |
| PMP1F7 | 131 | EVQLVESGGGL | 176 | NYWMY | 221 | WLRQAPG | 266 | SINTGGARTF |
| | | VQPGGSLHLSC | | | | KGLESVS | | YADSVKG |
| | | AASGFTFS | | | | | | |
| PMP25G2 | 132 | EVQLVESGGDL | 177 | RYEMS | 222 | WVRQAPG | 267 | GISTGGGWR |
| | | VQPGGSLRLSC | | | | KGLEWVS | | TYADSVKG |
| | | AASGFTFS | | | | | | |
| PMP1H10 | 133 | EVQLVESGGGL | 178 | SYTMY | 223 | WARQAPG | 268 | IIFTNGEGTY |
| | | VQPGGSLRLSC | | | | KELEWVS | | YSDSVKG |
| | | AASGFTVS | | | | | | |
| PMP1D2 | 134 | EVQLVESGGGL | 179 | TYGMA | 224 | WFRQAPG | 269 | INRSTGTIYY |
| | | VQAGSSLRLSC | | | | KEREFVA | | ADSVKG |
| | | VASGRSVS | | | | | | |
| PMP12E3 | 135 | EVQLVESGGGL | 180 | NYFMG | 225 | WFRQAPG | 270 | TIGWSGTDY |
| | | VQPGGSLRLSG | | | | KEREFVA | | ADSVKG |
| | | AASVRTFS | | | | | | |
| PMP7D7 | 136 | EVQLVESGGGL | 181 | SYDMG | 226 | WFRQAPG | 271 | AISTGGGWR |
| | | VQAGGSLRLSC | | | | KEREFVA | | RYADSVKG |
| | | VASGRTFG | | | | | | |
| PMP8F7 | 137 | EVQLVESGGGL | 182 | SYAMS | 227 | WFRQAPG | 272 | VINWSGGST |
| | | VQAGGSLRLSC | | | | KERDFVA | | YYADSVKG |
| | | AASARTFS | | | | | | |
| PMP7G6 | 138 | EVQLVESGGGL | 183 | AYTMG | 228 | WFRQAPG | 273 | ATSRSGGAT |
| | | VQAGDSLRLSC | | | | KEREFVS | | LYTDSVKG |
| | | AASGLTFS | | | | | | |
| PMP25B1 | 139 | EVQLVESGGGL | 184 | TYAMG | 229 | WFRQAPG | 274 | ALNWSGDRT |
| | | VQSGGSLRLSC | | | | KDREMVI | | WYLNSVKG |
| | | AASGLAFS | | | | | | |
| PMP25E1 | 140 | EVQLVESGGGL | 185 | NYNMG | 230 | WFRQAQG | 275 | AIRWSEDRV |
| | | VQAGVSLRLSC | | | | KDRELVA | | WYLGSVRG |
| | | AASGRTFG | | | | | | |
| PMP25D1 | 141 | EVQLVESGGRL | 186 | RYNMG | 231 | WFRQAPG | 276 | AAHWSGGR |
| | | VQAGGSLRLSC | | | | KEREFVA | | MWYKDSVK |
| | | AASGGIFS | | | | | | G |
| PMP25C1 | 142 | EVQLVESGGGL | 187 | SYDMG | 232 | WFRQAPG | 277 | AITSSGGRR |
| | | VQAGASLRLSC | | | | KERALVA | | WYADSVLG |
| | | AASGRTFS | | | | | | |
| PMP25D3 | 143 | EVQLVESGGRL | 188 | NYAMG | 233 | WFRQAPG | 278 | SITRTDNITY |
| | | VQAGDSLRLSC | | | | QEREILS | | YEDSVKG |
| | | AASGGTVR | | | | | | |
| PMP14G5 | 144 | EVQLVESGGGL | 189 | SYTMG | 234 | WFRQAPG | 279 | AGTWSTSVT |
| | | VQAGGSLRLSC | | | | KEREFVA | | EYADSVKG |
| | | AASGRTIS | | | | | | |
| PMP1C4 | 145 | EVQLVESGGGL | 190 | SYIMG | 235 | WFRQAPG | 280 | DINWNGSWR |
| | | VQAGGSLRLSC | | | | KEREFTA | | FYAESVNG |
| | | APSGRDIS | | | | | | |
| PVEGFPM | 146 | EVQLVESGGGL | 191 | TYTVT | 236 | WFRQTPG | 281 | SNRWNAKPY |
| P42810 | | VQAGGSLRLSC | | | | KEREFVA | | TTDSVKG |
| | | TASGRALD | | | | | | |
| PVEGFPM | 147 | KVQLVESGGGL | 192 | TYTVT | 237 | WFRQTPG | 282 | SIRWNAKPY |
| P42C5 | | VQAGGSLRLSC | | | | KEREFVA | | TTDSVKG |
| | | AASGRALD | | | | | | |
| PVEGFPM | 148 | EVQLVESGGGL | 193 | TYTVT | 238 | WFRQTPG | 283 | SNRWNAKPY |
| P42H5 | | VQAGGSLRLSC | | | | KEREFVA | | VTDSVKG |
| | | TASGRALD | | | | | | |
| PVEGFPM | 149 | EVQLVESGGGL | 194 | TYTVT | 239 | WFRQTPG | 284 | SDRWNAKPY |
| P42E12 | | VQAGGSLRLSC | | | | KEREFVA | | TTDSVKG |
| | | AASGRALD | | | | | | |
| PVEGFPM | 150 | EVQLVESGGGL | 195 | TYTVT | 240 | WFRQTPG | 285 | SIRWNAKPY |
| P42E2 | | VQAGGSLRLSC | | | | KGREFLA | | TTDSVKG |
| | | AASGRALD | | | | | | |
| PVEGFPM | 151 | EVQLVESGGGL | 196 | TYTVT | 241 | WFRQTPG | 286 | SVRWNAKPY |
| P42F1 | | VQPGGSLRLSC | | | | KTREFVA | | TTDSVKG |
| | | AASGRALD | | | | | | |
| PVEGFPM | 152 | EVHLVESGGGL | 197 | TYTVT | 242 | WFRQTPG | 287 | SVRWNAKPY |
| P42G5 | | VQAGGSLRLSC | | | | KTREFVA | | TTDSVKG |
| | | AASGRALD | | | | | | |
| PVEGFPM | 153 | EVQLVESGGGL | 198 | YYGIG | 243 | WFRQAPG | 288 | CISSSGGSTY |
| P42A9 | | VQPGGSLRLSC | | | | KEREWVS | | YADSVKG |
| | | AASGFTLD | | | | | | |
| PVEGFPM | 154 | EVQLVESGGGL | 199 | YYGIG | 244 | WFRQAPG | 289 | CISSSGGSVY |
| P42B5 | | VQPGGSLRLSC | | | | KEREWVS | | YADSVKG |
| | | AASGFTLD | | | | | | |
| PVEGFPM | 155 | EVQLVESGGGL | 200 | GVDVA | 245 | WFRQAPG | 290 | ALAWSGIRT |
| P42A5 | | VQAGGSLRLSC | | | | KEREFVA | | YYAVSVKG |
| | | AASGRTFS | | | | | | |
| PVEGFPM | 156 | EVPMVESGGG | 201 | GVDVA | 246 | WFRQAPG | 291 | ALAWSGIRT |
| P42A3 | | LVQAGGSLRLS | | | | KEREFVA | | YYAVSVKG |
| | | CAASGRTFS | | | | | | |
| PVEGFPM | 157 | EVQLVESGGGL | 202 | GVDVA | 247 | WFRQATG | 292 | ALAWSGIRT |
| P42F10 | | VQAGGSLRLSC | | | | KEREFVA | | YYAVSVKG |
| | | AASGRTFS | | | | | | |
| PVEGFPM | 158 | EVQLVESGGGL | 203 | GVDVA | 248 | WFRQAPG | 293 | ALAWSGIRT |
| P42A11 | | VQAGGSLRLSC | | | | KEREFVA | | YYAVSVKG |
| | | AASGRTFS | | | | | | |
| PVEGFPM | 159 | EVQLVESGGGL | 204 | GVDVA | 249 | WFRQAPG | 294 | ALAWSGIRT |
| P42C1 | | VQAGGSLRLSC | | | | KEREFVA | | YYAVSVKG |
| | | AASGRTFS | | | | | | |
| PVEGFPM | 160 | EVQLVESGGGL | 205 | SYSVG | 250 | WFRQAPG | 295 | AISWSVPYY |
| P42C12 | | VQPGGSLRLSC | | | | KEREFVT | | ADSVKG |
| | | AASGRALS | | | | | | |
| PVEGFPM | 161 | EVQLVESGGGL | 206 | TYRMG | 251 | WFRQAPG | 296 | LINWSSGTTV |
| P42H9 | | VQAGGALRLSC | | | | KEREFVA | | YADSVKG |
| | | AASGRTFE | | | | | | |
| PVEGFPM | 162 | EVQLVESGGGL | 207 | TYRMG | 252 | WFRQAPG | 297 | LINWSSGTTI |
| P42E3 | | VQAGGALRLSC | | | | KEREFVA | | YADSVKG |
| | | AASGRTFE | | | | | | |
| PVEGFPM | 163 | EVQLVESGGGL | 208 | TYRMG | 253 | WFRQAPG | 298 | LINWSSGTTI |
| P42C7 | | VQAGGALRLSC | | | | KEREFVA | | YADSVKG |
| | | AASGRTFE | | | | | | |
| PVEGFPM | 164 | EVQLVESGGGL | 209 | TYRMG | 254 | WFRQAPG | 299 | LINWSSGTTV |
| P42D5 | | VHAGGALRLSC | | | | KEREFVA | | YADSVKG |
| | | AASGRAFE | | | | | | |
| PVEGFPM | 165 | EVQLVESGGGL | 210 | TYRMG | 255 | WFRQAPG | 300 | LINWSSGTTV |
| P42D7 | | VQAGGALRPS | | | | KEREFVA | | YADSVKG |
| | | CAASGRTFE | | | | | | |
| PVEGFPM | 166 | EVQLVESGGGL | 211 | SYRMG | 256 | WFRQAPG | 301 | LINWSSGKTI |
| P42C10 | | VQAGGALHLSC | | | | KEREFVS | | YADSVKG |
| | | AVSGRTFE | | | | | | |
| PVEGFPM | 167 | EVQLVESGGGL | 212 | TYRMG | 257 | WFRQAPG | 302 | LINWSSGITV |
| P42D10 | | VQAGGALRLSC | | | | KEREFVA | | YLDSVKG |
| | | AASGRTFE | | | | | | |
| PVEGFPM | 168 | EVQLMESGGG | 213 | SYRMG | 258 | WFRQAPG | 303 | LINWSSGKTI |
| P42E4 | | LVQAGGSLRLS | | | | KEREFVS | | YADSVKG |
| | | CAVSGRTFE | | | | | | |
| PVEGFPM | 169 | EVQLVESGGG | 214 | SYRMG | 259 | WFRQAPG | 304 | LINWSSGKTI |
| P42B4 | | SVQAGGALRLS | | | | KEREFVS | | YADSVKG |
| | | CAVSGRTFE | | | | | | |
| PVEGFPM | 170 | EVQLVESGGGL | 215 | TYAMA | 260 | WFRQSPK | 305 | TLRWSDGST |
| P42B11 | | VQTGGSLRLSC | | | | NEREFVA | | YYADSVKG |
| | | AASGRTFG | | | | | | |

| | | | | | | |
|---|---|---|---|---|---|---|
| Clone | ID | FR3 | ID | CDR 3 | ID | FR4 |

| | | | | | | |
|---|---|---|---|---|---|---|
| PMP1A1 | 306 | RFTISRDNNKNAVYLQ | 351 | DPSRYFIT | 396 | WGQGTQVTVSS |
| | | MNSLKPEDTAVYYCAA | | TDRRGYD | | |
| | | | | Y | | |
| PMP19C6 | 307 | RFTISRDNAKKTVYLQ | 352 | SRGVALAT | 397 | WGQGTQVTVSS |
| | | MNSLKPEDTAVYYCAA | | ARPYDY | | |
| PMP1D1 | 308 | RFTISRDNAKAIVYLQ | 353 | SWRSSIWI | 398 | WAQGTQVTVSS |
| | | MNSLKLEDTAVYYCAA | | PAESDSY | | |
| | | | | DF | | |
| PMP1D10 | 309 | RFSISTDNANNILYLQM | 354 | GGAPNYT | 399 | RGRGTQVTVSS |
| | | NSLKPEDTALYSGAK | | P | | |
| PMP25H1 | 310 | RFTISRDNAKNTLYLQ | 355 | SHRTP | 400 | RSQGTQVTVSS |
| | | MNSLKPEDTAVYYCVQ | | | | |
| PMP1F7 | 311 | RFTISRDNAKNTLYLQ | 356 | DAAGRT | 401 | HGQGTQVTVSS |
| | | MNSLKSEDTAVYYCAK | | | | |
| PMP25G2 | 312 | RFTISRDNAKNTLYLQ | 357 | RDYGTSW | 402 | WGQGTQVTVSS |
| | | MNSLKPEDTAVYYCLN | | ADFPS | | |
| PMP1H10 | 313 | RFTVSRDNAKNTLYLQ | 358 | DPFGKL | 403 | KGQGTQVTVSS |
| | | MNSLKPEDTALYYCAR | | | | |
| PMP1D2 | 314 | RFTISRDNAKNTLYLQ | 359 | DVFFSGA | 404 | WGQGTQVTVSS |
| | | MNSLKPGDTALYYCAA | | HRYEASQ | | |
| | | | | WHY | | |
| PMP12E3 | 315 | RFTISRDNAKNTVYLQ | 360 | GYFKRLG | 405 | WGQGTQVTVSS |
| | | MNSLKPEDTAVYYCAA | | PTSPRDYT | | |
| | | | | Y | | |
| PMP7D7 | 316 | RFTISRDNGKNTMYLQ | 361 | GWSLAEF | 406 | WGQGTQVTVSS |
| | | MNSLKPEDTAVYYCAQ | | RS | | |
| PMP8F7 | 317 | RFTISRDNAKNTVYLE | 362 | TAFRRRTY | 407 | WGQGTQVTVSS |
| | | MNSLKPEDTAVYYCAS | | YTPESWD | | |
| | | | | Y | | |
| PMP7G6 | 318 | RFTISRDNAKNTVDLQ | 363 | KSRPGYG | 408 | WGQGTQVTVSS |
| | | MNNLKPGDTAVYYCAA | | GTLDYDY | | |
| PMP25B1 | 319 | RFTISRDNAKNTVSLQ | 364 | KASGTIRG | 409 | WGQGTQVTVSS |
| | | MNSLKPEDTAVYYCAA | | GSYYDSA | | |
| | | | | GYSH | | |
| PMP25E1 | 320 | RFTISRDNAKNTVYLQ | 365 | QDRRRGD | 410 | WGQGTQVTVSS |
| | | MNSLKPEDTAAYYCAA | | YYTPDYHY | | |
| PMP25D1 | 321 | RFTMSRDNNKNTVYLQ | 366 | DSGAWGG | 411 | WGQGTQVTVSS |
| | | MNSLKSEDTAVYYCAA | | SYYRAEEY | | |
| | | | | VY | | |
| PMP25C1 | 322 | RFTISRDNAKNTVSLQ | 367 | RGRVDYN | 412 | WGQGTQVTVSS |
| | | MSSLRPEDTAVYYCAA | | YYNKDAYT | | |
| | | | | Y | | |
| PMP25D3 | 323 | RFTIVRDTAKNTVYLQ | 368 | AMTHFAVL | 413 | WGQGTQVTVSS |
| | | MNSLKPEDTAVYYCAA | | EREYGY | | |
| PMP14G5 | 324 | RFTISRDTAKNTLYLQM | 369 | EPYIPVRT | 414 | WGQGTQVTVSS |
| | | NSLKPEDTAVYYCAA | | MRHMTFL | | |
| | | | | TY | | |
| PMP1C4 | 325 | RFTISRDNAKNTVYLQ | 370 | KERGSGA | 415 | WGQGTQVTVSS |
| | | MNSLKPEDTAVYYCAA | | YDY | | |
| PVEGFPM | 326 | RFTISRDNAKNTVYLQ | 371 | DLTTWAD | 416 | WGQGTQVTVSS |
| P42810 | | MNSLKPEDTAVYYCAA | | GPYRY | | |
| PVEGFPM | 327 | RFTISRDNAKNTVYLQ | 372 | DLTTWAD | 417 | WGQGTQVTVSS |
| P42C5 | | MNSLKPEDTAIYYCAA | | GPYRY | | |
| PVEGFPM | 328 | RFTISRDNAKNTVYLQ | 373 | DLTTWAD | 418 | WGQGTQVTVSS |
| P42H5 | | MNSLKPEDTAVYYCAA | | GPYRY | | |
| PVEGFPM | 329 | RFTISRDNAKNTVYLQ | 374 | DLTTWAD | 419 | WGQGTQVTVSS |
| P42E12 | | MNSLKPEDTAVYYCAA | | GPYRF | | |
| PVEGFPM | 330 | RFTMSRDNAKNTVYLQ | 375 | DPTTWAD | 420 | WGQGTQVTVSS |
| P42E2 | | MNSLRPEDTAVYYCAA | | GPYRY | | |
| PVEGFPM | 331 | RFTISRDNAKNTVYLQ | 376 | DPTTWAD | 421 | WGQGTQVTVSS |
| P42F1 | | MNSLKPEDTAVYYCAA | | GPYRY | | |
| PVEGFPM | 332 | RFTISRDNAKNTVYLQ | 377 | DPTTWAD | 422 | WGQGTQVTVSS |
| P42G5 | | MNSLKPEDTAVYYCAA | | GPYRY | | |
| PVEGFPM | 333 | RFTISRDNAKNTVYLQ | 378 | QKGTPPL | 423 | WGKGTLVTVSS |
| P42A9 | | MNSLKPEDTAVYYCAA | | GCPAYYG | | |
| | | | | MDY | | |
| PVEGFPM | 334 | RFTISRDNAKNTVYLQ | 379 | QKGTPPL | 424 | WGKGTLVTVSS |
| P42B5 | | MNSLKPEDAAVYYCAA | | GCPAYYG | | |
| | | | | MDY | | |
| PVEGFPM | 335 | RFTISRGDPNDTVYLQ | 380 | GRASRTS | 425 | WGQGAQVTVSS |
| P42A5 | | MTSLKPEDTAVYYCAT | | DYYTDRIY | | |
| | | | | DS | | |
| PVEGFPM | 336 | RFTISRGDPNDTVYLQ | 381 | GRASRTS | 426 | WGQGAQVTVSS |
| P42A3 | | MTSLKPEDTAVYYCAT | | DYYTDRIY | | |
| | | | | DS | | |
| PVEGFPM | 337 | RFTISRGDPNDTVYLQ | 382 | GRASRTS | 427 | WGQGAQVTVSS |
| P42F10 | | MTSLKPEDTAVYYCAT | | DYYTDRIY | | |
| | | | | DS | | |
| PVEGFPM | 338 | RFTISRGDPNDTVYLQ | 383 | GRASSTS | 428 | WGQGAQVTVSS |
| P42A11 | | MTSLKPEDTAVYYCAT | | DYYTDRIY | | |
| | | | | DS | | |
| PVEGFPM | 339 | RFTISRGNPNDTVYLQ | 384 | GRAYRGS | 429 | WGQGAQVTVSS |
| P42C1 | | MTSLKPEDTAVYYCAT | | DYYTDRIY | | |
| | | | | DS | | |
| PVEGFPM | 340 | RFTISRDNAKNTVYLQ | 385 | DSLYWRS | 430 | WGQGTQVTVSS |
| P42C12 | | MNSLKPEDTAVYYCAA | | SRMATDY | | |
| | | | | DY | | |
| PVEGFPM | 341 | RFTISGDNAKDTVYLE | 386 | GRRWSGS | 431 | WGQGTQVTVSS |
| P42H9 | | MNSLKPEDTAVYYCAV | | YYSALAYQ | | |
| | | | | Y | | |
| PVEGFPM | 342 | RFTISGDNAKDTVYLE | 387 | GRRWSGS | 432 | WGQGTQVTVSS |
| P42E3 | | MNSLKPEDTAVYYCAV | | YYSALAYQ | | |
| | | | | Y | | |
| PVEGFPM | 343 | RFTISGDNAKDTVYLE | 388 | GRRWSGS | 433 | WGKGTQVTVSS |
| P42C7 | | MNSLKPEDTAVYYCAV | | YYSALAYQ | | |
| | | | | Y | | |
| PVEGFPM | 344 | RFTISGDNAKDTVYLE | 389 | GRRWSGS | 434 | WGQGTQVTVSS |
| P42D5 | | MNSLKPEDTAVYYCAV | | YYSALAYQ | | |
| | | | | Y | | |
| PVEGFPM | 345 | RFTISGDNAKDTVYLE | 390 | GRRWSGS | 435 | WGQGTQVTVSS |
| P42D7 | | MNSLKPEDTAVYYCAV | | YYSALAYQ | | |
| | | | | Y | | |
| PVEGFPM | 346 | RFTISGDNAKDTVYLE | 391 | GRAWSGS | 436 | WGQGTQVTVSS |
| P42C10 | | MNSLKPEDTAVYYCAV | | YYSALAYQ | | |
| | | | | Y | | |
| PVEGFPM | 347 | RFTISGDNAKDTVYLE | 392 | GRAWSGS | 437 | WGQGTGVTVSS |
| P42D10 | | MNSLKPEDTAVYYCAV | | YYSALAYQ | | |
| | | | | Y | | |
| PVEGFPM | 348 | RFTISGDNAKDTVYLE | 393 | GRAWSGS | 438 | WGQGTQVTVSS |
| P42E4 | | MNSLKPEDTAVYYCAV | | YYSALAYQ | | |
| | | | | Y | | |
| PVEGFPM | 349 | RFTISGDNAKDTVYLE | 394 | GRAWSGS | 439 | WGQGTQVTVSS |
| P42B4 | | MNSLKPEDTAVYYCAV | | HYSALAYQ | | |
| | | | | Y | | |
| PVEGFPM | 350 | RFTIAGDNAKNTVYLQ | 395 | DRWFSYT | 440 | WGQGTQVTVSS |
| P42B11 | | MNNLKPEDTAVYYCAA | | TYDATDT | | |
| | | | | WHY | | |

[0400] Thus, in the Nanobodies of the invention, at least one of the CDR1, CDR2 and CDR3 sequences present is suitably chosen from the group consisting of the CDR1, CDR2 and CDR3 sequences, respectively, listed in Table A-1; or from the group of CDR1, CDR2 and CDR3 sequences, respectively, that have at least 80%, preferably at least 90%, more preferably at least 95%, even more preferably at least 99% “sequence identity” (as defined herein) with at least one of the CDR1, CDR2 and CDR3 sequences, respectively, listed in Table A-1; and/or from the group consisting of the CDR1, CDR2 and CDR3 sequences, respectively, that have 3, 2 or only 1 “amino acid difference(s)” (as defined herein) with at least one of the CDR1, CDR2 and CDR3 sequences, respectively, listed in Table A-1.

[0401] In this context, by “suitably chosen” is meant that, as applicable, a CDR1 sequence is chosen from suitable CDR1 sequences (i.e. as defined herein), a CDR2 sequence is chosen from suitable CDR2 sequences (i.e. as defined herein), and a CDR3 sequence is chosen from suitable CDR3 sequence (i.e. as defined herein), respectively. More in particular, the CDR sequences are preferably chosen such that the Nanobodies of the invention bind to VEGF with an affinity (suitably measured and/or expressed as a K_{D}-value (actual or apparent), a K_{A}-value (actual or apparent), a kₒₙ-rate and/or a k_{off}-rate, or alternatively as an IC₅₀ value, as further described herein) that is as defined herein.

[0402] In particular, in the Nanobodies of the invention, at least the CDR3 sequence present is suitably chosen from the group consisting of the CDR3 sequences listed in Table A-1 or from the group of CDR3 sequences that have at least 80%, preferably at least 90%, more preferably at least 95%, even more preferably at least 99% sequence identity with at least one of the CDR3 sequences listed in Table A-1; and/or from the group consisting of the CDR3 sequences that have 3, 2 or only 1 amino acid differenee(s) with at least one of the CDR3 sequences listed in Table A-1.

[0403] Preferably, in the Nanobodies of the invention, at least two of the CDR1, CDR2 and CDR3 sequences present are suitably chosen from the group consisting of the CDR1, CDR2 and CDR3 sequences, respectively, listed in Table A-1 or from the group consisting of CDR1, CDR2 and CDR3 sequences, respectively, that have at least 80%, preferably at least 90%, more preferably at least 95%, even more preferably at least 99% sequence identity with at least one of the CDR1, CDR2 and CDR3 sequences, respectively, listed in Table A-1; and/or from the group consisting of the CDR1, CDR2 and CDR3 sequences, respectively, that have 3, 2 or only 1 “amino acid difference(s)” with at least one of the CDR1, CDR2 and CDR3 sequences, respectively, listed in Table A-1.

[0404] In particular, in the Nanobodies of the invention, at least the CDR3 sequence present is suitably chosen from the group consisting of the CDR3 sequences listed in Table A-1 or from the group of CDR3 sequences that have at least 80%, preferably at least 90%, more preferably at least 95%, even more preferably at least 99% sequence identity with at least one of the CDR3 sequences listed in Table A-1, respectively; and at least one of the CDR1 and CDR2 sequences present is suitably chosen from the group consisting of the CDR1 and CDR2 sequences, respectively, listed in Table A-1 or from the group of CDR1 and CDR2 sequences, respectively, that have at least 80%, preferably at least 90%, more preferably at least 95%, even more preferably at least 99% sequence identity with at least one of the CDR1 and CDR2 sequences, respectively, listed in Table A-1; and/or from the group consisting of the CDR1 and CDR2 sequences, respectively, that have 3, 2 or only 1 amino acid difference(s) with at least one of the CDR1 and CDR2 sequences, respectively, listed in Table A-1.

[0405] Most preferably, in the Nanobodies of the invention, all three CDR1, CDR2 and CDR3 sequences present are suitably chosen from the group consisting of the CDR1, CDR2 and CDR3 sequences, respectively, listed in Table A-1 or from the group of CDR1, CDR2 and CDR3 sequences, respectively, that have at least 80%, preferably at least 90%, more preferably at least 95%, even more preferably at least 99% sequence identity with at least one of the CDR1, CDR2 and CDR3 sequences, respectively, listed in Table A-1; and/or from the group consisting of the CDR1, CDR2 and CDR3 sequences, respectively, that have 3, 2 or only 1 amino acid difference(s) with at least one of the CDR1, CDR2 and CDR3 sequences, respectively, listed in Table A-1.

[0406] Even more preferably, in the Nanobodies of the invention, at least one of the CDR1, CDR2 and CDR3 sequences present is suitably chosen from the group consisting of the CDR1, CDR2 and CDR3 sequences, respectively, listed in Table A-1. Preferably, in this aspect, at least one or preferably both of the other two CDR sequences present are suitably chosen from CDR sequences that have at least 80%, preferably at least 90%, more preferably at least 95%, even more preferably at least 99% sequence identity with at least one of the corresponding CDR sequences, respectively, listed in Table A-1; and/or from the group consisting of the CDR sequences that have 3, 2 or only 1 amino acid difference(s) with at least one of the corresponding sequences, respectively, listed in Table A-1.

[0407] In particular, in the Nanobodies of the invention, at least the CDR3 sequence present is suitably chosen from the group consisting of the CDR3 listed in Table A-1. Preferably, in this aspect, at least one and preferably both of the CDR1 and CDR2 sequences present are suitably chosen from the groups of CDR1 and CDR2 sequences, respectively, that have at least 80%, preferably at least 90%, more preferably at least 95%, even more preferably at least 99% sequence identity with the CDR1 and CDR2 sequences, respectively, listed in Table A-1; and/or from the group consisting of the CDR1 and CDR2 sequences, respectively, that have 3, 2 or only 1 amino acid difference(s) with at least one of the CDR1 and CDR2 sequences, respectively, listed in Table A-1.

[0408] Even more preferably, in the Nanobodies of the invention, at least two of the CDR1, CDR2 and CDR3 sequences present are suitably chosen from the group consisting of the CDR1, CDR2 and CDR3 sequences, respectively, listed in Table A-1. Preferably, in this aspect, the remaining CDR sequence present is suitably chosen from the group of CDR sequences that have at least 80%, preferably at least 90%, more preferably at least 95%, even more preferably at least 99% sequence identity with at least one of the corresponding CDR sequences listed in Table A-1; and/or from the group consisting of CDR sequences that have 3, 2 or only 1 amino acid difference(s) with at least one of the corresponding sequences listed in Table A-1.

[0409] In particular, in the Nanobodies of the invention, at least the CDR3 sequence is suitably chosen from the group consisting of the CDR3 sequences listed in Table A-1, and either the CDR1 sequence or the CDR2 sequence is suitably chosen from the group consisting of the CDR1 and CDR2 sequences, respectively, listed in Table A-1. Preferably, in this aspect, the remaining CDR sequence present is suitably chosen from the group of CDR sequences that have at least 80%, preferably at least 90%, more preferably at least 95%, even more preferably at least 99% sequence identity with at least one of the corresponding CDR sequences listed in Table A-1; and/or from the group consisting of CDR sequences that have 3, 2 or only 1 amino acid difference(s) with the corresponding CDR sequences listed in Table A-1.

[0410] Even more preferably, in the Nanobodies of the invention, all three CDR1, CDR2 and CDR3 sequences present are suitably chosen from the group consisting of the CDR1, CDR2 and CDR3 sequences, respectively, listed in Table A-1.

[0411] Also, generally, the combinations of CDR's listed in Table A-1 (i.e. those mentioned on the same line in Table A-1) are preferred. Thus, it is generally preferred that, when a CDR in a Nanobody of the invention is a CDR sequence mentioned in Table A-1 or is suitably chosen from the group of CDR sequences that have at least 80%, preferably at least 90%, more preferably at least 95%, even more preferably at least 99% sequence identity with a CDR sequence listed in Table A-1; and/or from the group consisting of CDR sequences that have 3, 2 or only 1 amino acid difference(s) with a CDR sequence listed in Table A-1, that at least one and preferably both of the other CDR's are suitably chosen from the CDR sequences that belong to the same combination in Table A-1 (i.e. mentioned on the same line in Table A-1) or are suitably chosen from the group of CDR sequences that have at least 80%, preferably at least 90%, more preferably at least 95%, even more preferably at least 99% sequence identity with the CDR sequence(s) belonging to the same combination and/or from the group consisting of CDR sequences that have 3, 2 or only 1 amino acid difference(s) with the CDR sequence(s) belonging to the same combination. The other preferences indicated in the above paragraphs also apply to the combinations of CDR's mentioned in Table A-1.

[0412] Thus, by means of non-limiting examples, a Nanobody of the invention can for example comprise a CDR1 sequence that has more than 80% sequence identity with one of the CDR1 sequences mentioned in Table A-1, a CDR2 sequence that has 3, 2 or 1 amino acid difference with one of the CDR2 sequences mentioned in Table A-1 (but belonging to a different combination), and a CDR3 sequence.

[0413] Some preferred Nanobodies of the invention may for example comprise: (1) a CDR1 sequence that has more than 80% sequence identity with one of the CDR1 sequences mentioned in Table A-1; a CDR2 sequence that has 3, 2 or 1 amino acid difference with one of the CDR2 sequences mentioned in Table A-1 (but belonging to a different combination); and a CDR3 sequence that has more than 80% sequence identity with one of the CDR3 sequences mentioned in Table A-1 (but belonging to a different combination); or (2) a CDR1 sequence that has more than 80% sequence identity with one of the CDR1 sequences mentioned in Table A-1; a CDR2 sequence, and one of the CDR3 sequences listed in Table A-1; or (3) a CDR1 sequence; a CDR2 sequence that has more than 80% sequence identity with one of the CDR2 sequence listed in Table A-1; and a CDR3 sequence that has 3, 2 or 1 amino acid differences with the CDR3 sequence mentioned in Table A-1 that belongs to the same combination as the CDR2 sequence.

[0414] Some particularly preferred Nanobodies of the invention may for example comprise: (1) a CDR1 sequence that has more than 80% sequence identity with one of the CDR1 sequences mentioned in Table A-1; a CDR2 sequence that has 3, 2 or 1 amino acid difference with the CDR2 sequence mentioned in Table A-1 that belongs to the same combination; and a CDR3 sequence that has more than 80% sequence identity with the CDR3 sequence mentioned in Table A-1 that belongs to the same combination; (2) a CDR1 sequence; a CDR 2 listed in Table A-1 and a CDR3 sequence listed in Table A-1 (in which the CDR2 sequence and CDR3 sequence may belong to different combinations).

[0415] Some even more preferred Nanobodies of the invention may for example comprise: (1) a CDR1 sequence that has more than 80% sequence identity with one of the CDR1 sequences mentioned in Table A-1; the CDR2 sequence listed in Table A-1 that belongs to the same combination; and a CDR3 sequence mentioned in Table A-1 that belongs to a different combination; or (2) a CDR1 sequence mentioned in Table A-1; a CDR2 sequence that has 3, 2 or 1 amino acid differences with the CDR2 sequence mentioned in Table A-1 that belongs to the same combination; and a CDR3 sequence that has more than 80% sequence identity with the CDR3 sequence listed in Table A-1 that belongs to the same or a different combination.

[0416] Particularly preferred Nanobodies of the invention may for example comprise a CDR1 sequence mentioned in Table A-1, a CDR2 sequence that has more than 80% sequence identity with the CDR2 sequence mentioned in Table A-1 that belongs to the same combination; and the CDR3 sequence mentioned in Table A-1 that belongs to the same combination.

[0417] In the most preferred Nanobodies of the invention, the CDR1, CDR2 and CDR3 sequences present are suitably chosen from one of the combinations of CDR1, CDR2 and CDR3 sequences, respectively, listed in Table A-1.

[0418] According to another preferred, but non-limiting aspect of the invention (a) CDR1 has a length of between 1 and 12 amino acid residues, and usually between 2 and 9 amino acid residues, such as 5, 6 or 7 amino acid residues; and/or (b) CDR2 has a length of between 13 and 24 amino acid residues, and usually between 15 and 21 amino acid residues, such as 16 and 17 amino acid residues; and/or (c) CDR3 has a length of between 2 and 35 amino acid residues, and usually between 3 and 30 amino acid residues, such as between 6 and 23 amino acid residues.

[0419] In another preferred, but non-limiting aspect, the invention relates to a Nanobody in which the CDR sequences {as defined herein) have more than 80%, preferably more than 90%, more preferably more than 95%, such as 99% or more sequence identity {as defined herein) with the CDR sequences of at least one of the amino acid sequences of SEQ ID NO's: 441-485.

[0420] Generally, Nanobodies with the above CDR sequences may be as further described herein, and preferably have framework sequences that are also as further described herein. Thus, for example and as mentioned herein, such Nanobodies may be naturally occurring Nanobodies (from any suitable species), naturally occurring V_{HH} sequences (i.e. from a suitable species of Camelid) or synthetic or semi-synthetic amino acid sequences or Nanobodies, including but not limited to partially humanized Nanobodies or V_{HH} sequences, fully humanized Nanobodies or V_{HH} sequences, camelized heavy chain variable domain sequences, as well as Nanobodies that have been obtained by the techniques mentioned herein.

[0421] Thus, in one specific, but non-limiting aspect, the invention relates to a humanized Nanobody, which consists of 4 framework regions (FR1 to FR4 respectively) and 3 complementarity determining regions (CDR1 to CDR3 respectively), in which CDR1 to CDR3 are as defined herein and in which said humanized Nanobody comprises at least one humanizing substitution (as defined herein), and in particular at least one humanizing substitution in at least one of its framework sequences (as defined herein).

[0422] In another preferred, but non-limiting aspect, the invention relates to a Nanobody in which the CDR sequences have at least 70% amino acid identity, preferably at least 80% amino acid identity, more preferably at least 90% amino acid identity, such as 95% amino acid identity or more or even essentially 100% amino acid identity with the CDR sequences of at least one of the amino acid sequences of SEQ ID NO's: 441-485. This degree of amino acid identity can for example be determined by determining the degree of amino acid identity (in a manner described herein) between said Nanobody and one or more of the sequences of SEQ ID NO's: 441-485, in which the amino acid residues that form the framework regions are disregarded. Such Nanobodies can be as further described herein.

[0423] In another preferred, but non-limiting aspect, the invention relates to a Nanobody with an amino acid sequence that is chosen from the group consisting of SEQ ID NO's: 441-485 or from the group consisting of from amino acid sequences that have more than 80%, preferably more than 90%, more preferably more than 95%, such as 99% or more sequence identity (as defined herein) with at least one of the amino acid sequences of SEQ ID NO's: 441-485.

[0424] Another preferred, but non-limiting aspect of the invention relates to humanized variants of the Nanobodies of SEQ ID NO's: 441-485, that comprise, compared to the corresponding native V_{HH} sequence, at least one humanizing substitution (as defined herein), and in particular at least one humanizing substitution in at least one of its framework sequences (as defined herein).

[0425] The polypeptides of the invention comprise or essentially consist of at least one Nanobody of the invention. Some preferred, but non-limiting examples of polypeptides of the invention are given in. SEQ ID NO's: 486-677.

[0426] It will be clear to the skilled person that the Nanobodies that are mentioned herein as “preferred” (or “more preferred”, “even more preferred”, etc.) are also preferred (or more preferred, or even more preferred, etc.) for use in the polypeptides described herein. Thus, polypeptides that comprise or essentially consist of one or more “preferred” Nanobodies of the invention will generally be preferred, and polypeptides that comprise or essentially consist of one or more “more preferred” Nanobodies of the invention will generally be more preferred, etc.

[0427] Generally, proteins or polypeptides that comprise or essentially consist of a single Nanobody (such as a single Nanobody of the invention) will be referred to herein as “monovalent” proteins or polypeptides or as “monovalent constructs”. Proteins and polypeptides that comprise or essentially consist of two or more Nanobodies (such as at least two Nanobodies of the invention or at least one Nanobody of the invention and at least one other Nanobody) will be referred to herein as “multivalent” proteins or polypeptides or as “multivalent constructs”, and these may provide certain advantages compared to the corresponding monovalent Nanobodies of the invention. Some non-limiting examples of such multivalent constructs will become clear from the further description herein.

[0428] According to one specific, but non-limiting aspect, a polypeptide of the invention comprises or essentially consists of at least two Nanobodies of the invention, such as two or three Nanobodies of the invention. As further described herein, such multivalent constructs can provide certain advantages compared to a protein or polypeptide comprising or essentially consisting of a single Nanobody of the invention, such as a much improved avidity for VEGF. Such multivalent constructs will be clear to the skilled person based on the disclosure herein; some preferred, but non-limiting examples of such multivalent Nanobody constructs are the constructs of SEQ ID NO's: 486-677.

[0429] According to another specific, but non-limiting aspect, a polypeptide of the invention comprises or essentially consists of at least one Nanobody of the invention and at least one other binding unit (i.e. directed against another epitope, antigen, target, protein or polypeptide), which is preferably also a Nanobody. Such proteins or polypeptides are also referred to herein as “multispecific” proteins or polypeptides or as ‘multispecific constructs”, and these may provide certain advantages compared to the corresponding monovalent Nanobodies of the invention (as will become clear from the further discussion herein of some preferred, but-nonlimiting multispecific constructs). Such multispecific constructs will be clear to the skilled person based on the disclosure herein; some preferred, but non-limiting examples of such multispecific Nanobody constructs are the constructs of SEQ ID NO's: 576-677.

[0430] In on aspect, a polypeptide, compound or construct of the invention is a multispecific (e.g. bispecific) polypeptide, compound or construct that comprises or essentially consists of a Nanobody of the invention against VEGF and a Nanobody against VEGFR-1 and/or VEGR-2. In another aspect, a polypeptide, compound or construct of the invention is a multispecific (e.g. bispecific) polypeptide, compound or construct that comprises or essentially consists of a Nanobody of the invention against VEGF and a Nanobody against a tumor antigen.

[0431] In another aspect, a polypeptide, compound or construct of the invention is a multiparatopic (biparatopic) polypeptide, compound or construct that comprises or essentially consists of a Nanobody against the binding site on VEGF for VEGFR-1 and a Nanobody against the binding site on VEGF for VEGFR-2.

[0432] According to yet another specific, but non-limiting aspect, a polypeptide of the invention comprises or essentially consists of at least one Nanobody of the invention, optionally one or more further Nanobodies, and at least one other amino acid sequence (such as a protein or polypeptide) that confers at least one desired property to the Nanobody of the invention and/or to the resulting fusion protein. Again, such fusion proteins may provide certain advantages compared to the corresponding monovalent Nanobodies of the invention. Some non-limiting examples of such amino acid sequences and of such fusion constructs will become clear from the further description herein.

[0433] It is also possible to combine two or more of the above aspects, for example to provide a trivalent bispecific construct comprising two Nanobodies of the invention and one other Nanobody, and optionally one or more other amino acid sequences. Further non-limiting examples of such constructs, as well as some constructs that are particularly preferred within the context of the present invention, will become clear from the further description herein.

[0434] In the above constructs, the one or more Nanobodies and/or other amino acid sequences may be directly linked to each other and/or suitably linked to each other via one or more linker sequences. Some suitable but non-limiting examples of such linkers will become clear from the further description herein.

[0435] In one specific aspect of the invention, a Nanobody of the invention or a compound, construct or polypeptide of the invention comprising at least one Nanobody of the invention may have an increased half-life, compared to the corresponding amino acid sequence of the invention. Some preferred, but non-limiting examples of such Nanobodies, compounds and polypeptides will become clear to the skilled person based on the further disclosure herein, and for example comprise Nanobodies sequences or polypeptides of the invention that have been chemically modified to increase the half-life thereof (for example, by means of pegylation); amino acid sequences of the invention that comprise at least one additional binding site for binding to a serum protein (such as serum albumin); or polypeptides of the invention that comprise at least one Nanobody of the invention that is linked to at least one moiety (and in particular at least one amino acid sequence) that increases the half-life of the Nanobody of the invention. Examples of polypeptides of the invention that comprise such half-life extending moieties or amino acid sequences will become clear to the skilled person based on the further disclosure herein; and for example include, without limitation, polypeptides in which the one or more Nanobodies of the invention are suitable linked to one or more serum proteins or fragments thereof (such as serum albumin or suitable fragments thereof) or to one or more binding units that can bind to serum proteins (such as, for example, Nanobodies or (single) domain antibodies that can bind to serum proteins such as serum albumin, serum immunoglobulins such as IgG, or transferrine); polypeptides in which a Nanobody of the invention is linked to an Fc portion (such as a human Fc) or a suitable part or fragment thereof; or polypeptides in which the one or more Nanobodies of the invention are suitable linked to one or more small proteins or peptides that can bind to serum proteins (such as, without limitation, the proteins and peptides described in WO 91/01743, WO 01/45746, WO 02/076489 and to the U.S. provisional application of Ablynx N.V. entitled “Peptides capable of binding to serum proteins” of Ablynx N.V. filed on. Dec. 5, 2006 (see also PCT/EP/2007/063348).

[0436] Again, as will be clear to the skilled person, such Nanobodies, compounds, constructs or polypeptides may contain one or more additional groups, residues, moieties or binding units, such as one or more further amino acid sequences and in particular one or more additional Nanobodies (i.e. not directed against VEGF), so as to provide a tri- of multispecific Nanobody construct.

[0437] Generally, the Nanobodies of the invention (or compounds, constructs or polypeptides comprising the same) with increased half-life preferably have a half-life that is at least 1.5 times, preferably at least 2 times, such as at least 5 times, for example at least 10 times or more than 20 times, greater than the half-life of the corresponding amino acid sequence of the invention per se. For example, the Nanobodies, compounds, constructs or polypeptides of the invention with increased half-life may have a half-life that is increased with more than 1 hours, preferably more than 2 hours, more preferably more than 6 hours, such as more than 12 hours, or even more than 24, 48 or 72 hours, compared to the corresponding amino acid sequence of the invention per se.

[0438] In a preferred, but non-limiting aspect of the invention, such Nanobodies, compound, constructs or polypeptides of the invention exhibit a serum half-life in human of at least about 12 hours, preferably at least 24 hours, more preferably at least 48 hours, even more preferably at least 72 hours or more. For example, compounds or polypeptides of the invention may have a half-life of at least 5 days (such as about 5 to 10 days), preferably at least 9 days (such as about 9 to 14 days), more preferably at least about 10 days (such as about 10 to 15 days), or at least about 11 days (such as about 11 to 16 days), more preferably at least about 12 days (such as about 12 to 18 days or more), or more than 14 days (such as about 14 to 19 days).

[0439] In another one aspect of the invention, a polypeptide of the invention comprises one or more (such as two or preferably one) Nanobodies of the invention linked (optionally via one or more suitable linker sequences) to one or more (such as two and preferably one) amino acid sequences that allow the resulting polypeptide of the invention to cross the blood brain barrier. In particular, said one or more amino acid sequences that allow the resulting polypeptides of the invention to cross the blood brain barrier may be one or more (such as two and preferably one) Nanobodies, such as the Nanobodies described in WO 02/057445, of which FC44 (SEQ ID NO: 189 of WO 06/040153) and FCS (SEQ ID NO: 190 of WO 06/040154) are preferred examples.

[0440] In particular, polypeptides comprising one or more Nanobodies of the invention are preferably such that they:
[0441] bind to VEGF with a dissociation constant (K_{D}) of 10⁻⁵ to 10⁻¹² moles/liter or less, and preferably 10⁻⁷ to 10⁻¹² moles/liter or less and more preferably 10⁻⁸ to 10⁻¹² moles/liter (i.e. with an association constant (K_{A}) of 10⁵ to 10¹² liter/moles or more, and preferably 10⁷ to 10¹² liter/moles or more and more preferably 10⁸ to 10¹² liter/moles);
   and/or such that they:
[0442] bind to VEGF with a kₒₙ-rate of between 10²M⁻¹ s⁻¹ to about 10⁷ M⁻¹ s⁻¹, preferably between 10³ M⁻¹ s⁻¹ and 10⁷ M⁻¹ s⁻¹, more preferably between 10⁴ M⁻¹ s⁻¹ and 10⁷ M⁻¹ s⁻¹, such as between 10⁵ M⁻¹ s⁻¹ and 10⁷ M⁻¹ s⁻¹;
   and/or such that they:
[0443] bind to VEGF with a k_{off} rate between 1 s⁻¹ (t_{1/2}=0.69 s) and 10⁻⁶ s⁻¹ (providing a near irreversible complex with a t_{1/2} of multiple days), preferably between 10⁻² s⁻¹ and 10⁻⁶ s⁻¹, more preferably between 10⁻³ s⁻¹ and 10⁻⁶ s⁻¹, such as between 10⁻⁴ s⁻¹ and 10⁻⁶ s⁻¹.

[0444] Preferably, a polypeptide that contains only one amino acid sequence of the invention is preferably such that it will bind to VEGF with an affinity less than 500 nM, preferably less than 200 nM, more preferably less than 10 nM, such as less than 500 pM. In this respect, it will be clear to the skilled person that a polypeptide that contains two or more Nanobodies of the invention may bind to VEGF with an increased avidity, compared to a polypeptide that contains only one amino acid sequence of the invention.

[0445] Some preferred IC₅₀ values for binding of the amino acid sequences or polypeptides of the invention to VEGF will become clear from the further description and examples herein.

[0446] Other polypeptides according to this preferred aspect of the invention may for example be chosen from the group consisting of amino acid sequences that have more than 80%, preferably more than 90%, more preferably more than 95%, such as 99% or more “sequence identity” (as defined herein) with one or more of the amino acid sequences of SEQ ID NO's: 486-677, in which the Nanobodies comprised within said amino acid sequences are preferably as further defined herein.

[0447] Another aspect of this invention relates to a nucleic acid that encodes an amino acid sequence of the invention (such as a Nanobody of the invention) or a polypeptide of the invention comprising the same. Again, as generally described herein for the nucleic acids of the invention, such a nucleic acid may be in the form of a genetic construct, as defined herein.

[0448] In another aspect, the invention relates to host or host cell that expresses or that is capable of expressing an amino acid sequence (such as a Nanobody) of the invention and/or a polypeptide of the invention comprising the same; and/or that contains a nucleic acid of the invention. Some preferred but non-limiting examples of such hosts or host cells will become clear from the further description herein.

[0449] Another aspect of the invention relates to a product or composition containing or comprising at least one amino acid sequence of the invention, at least one polypeptide of the invention and/or at least one nucleic acid of the invention, and optionally one or more further components of such compositions known per se, i.e. depending on the intended use of the composition. Such a product or composition may for example be a pharmaceutical composition (as described herein), a veterinary composition or a product or composition for diagnostic use (as also described herein). Some preferred but non-limiting examples of such products or compositions will become clear from the further description herein.

[0450] The invention further relates to methods for preparing or generating the amino acid sequences, compounds, constructs, polypeptides, nucleic acids, host cells, products and compositions described herein. Some preferred but non-limiting examples of such methods will become clear from the further description herein.

[0451] The invention further relates to applications and uses of the amino acid sequences, compounds, constructs, polypeptides, nucleic acids, host cells, products and compositions described herein, as well as to methods for the prevention and/or treatment for diseases and disorders associated with VEGF. Some preferred but non-limiting applications and uses will become clear from the further description herein.

[0452] Other aspects, embodiments, advantages and applications of the invention will also become clear from the further description hereinbelow.

[0453] Generally, it should be noted that the term Nanobody as used herein in its broadest sense is not limited to a specific biological source or to a specific method of preparation. For example, as will be discussed in more detail below, the Nanobodies of the invention can generally be obtained: (1) by isolating the V_{HH} domain of a naturally occurring heavy chain antibody; (2) by expression of a nucleotide sequence encoding a naturally occurring V_{HH} domain; (3) by “humanization” (as described herein) of a naturally occurring V_{HH} domain or by expression of a nucleic acid encoding a such humanized V_{HH} domain; (4) by “camelization” (as described herein) of a naturally occurring V_{H} domain from any animal species, and in particular a from species of mammal, such as from a human being, or by expression of a nucleic acid encoding such a camelized V_{H} domain; (5) by “camelization” of a “domain antibody” or “Dab” as described by Ward et al (supra), or by expression of a nucleic acid encoding such a camelized V_{H} domain; (6) by using synthetic or semi-synthetic techniques for preparing proteins, polypeptides or other amino acid sequences known per se; (7) by preparing a nucleic acid encoding a Nanobody using techniques for nucleic acid synthesis known per se, followed by expression of the nucleic acid thus obtained; and/or (8) by any combination of one or more of the foregoing. Suitable methods and techniques for performing the foregoing will be clear to the skilled person based on the disclosure herein and for example include the methods and techniques described in more detail herein.

[0454] One preferred class of Nanobodies corresponds to the V_{HH} domains of naturally occurring heavy chain antibodies directed against VEGF. As further described herein, such V_{HH} sequences can generally be generated or obtained by suitably immunizing a species of Camelid with VEGF (i.e. so as to raise an immune response and/or heavy chain antibodies directed against VEGF), by obtaining a suitable biological sample from said Camelid (such as a blood sample, serum sample or sample of B-cells), and by generating V_{HH} sequences directed against VEGF, starting from said sample, using any suitable technique known per se. Such techniques will be clear to the skilled person and/or are further described herein.

[0455] Alternatively, such naturally occurring V_{HH} domains against VEGF, can be obtained from naive libraries of Camelid V_{HH} sequences, for example by screening such a library using VEGF, or at least one part, fragment, antigenic determinant or epitope thereof using one or more screening techniques known per se. Such libraries and techniques are for example described in WO 99/37681, WO 01/90190, WO 03/025020 and WO 03/035694.

[0456] Alternatively, improved synthetic or semi-synthetic libraries derived from naïve V_{HH} libraries may be used, such as V_{HH} libraries obtained from naive V_{HH} libraries by techniques such as random mutagenesis and/or CDR shuffling, as for example described in WO 00/43507.

[0457] Thus, in another aspect, the invention relates to a method for generating Nanobodies, that are directed against VEGF. In one aspect, said method at least comprises the steps of:
[0458] a) providing a set, collection or library of Nanobody sequences; and
[0459] b) screening said set, collection or library of Nanobody sequences for Nanobody sequences that can bind to and/or have affinity for VEGF;
   and
[0460] c) isolating the amino acid sequence(s) that can bind to and/or have affinity for VEGF.

[0461] In such a method, the set, collection or library of Nanobody sequences may be a naïve set, collection or library of Nanobody sequences; a synthetic or semi-synthetic set, collection or library of Nanobody sequences; and/or a set, collection or library of Nanobody sequences that have been subjected to affinity maturation.

[0462] In a preferred aspect of this method, the set, collection or library of Nanobody sequences may be an immune set, collection or library of Nanobody sequences, and in particular an immune set, collection or library of V_{HH} sequences, that have been derived from a species of Camelid that has been suitably immunized with VEGF or with a suitable antigenic determinant based thereon or derived therefrom, such as an antigenic part, fragment, region, domain, loop or other epitope thereof. In one particular aspect, said antigenic determinant may be an extracellular part, region, domain, loop or other extracellular epitope(s).

[0463] In the above methods, the set, collection or library of Nanobody or V_{HH} sequences may be displayed on a phage, phagemid, ribosome or suitable micro-organism (such as yeast), such as to facilitate screening. Suitable methods, techniques and host organisms for displaying and screening (a set, collection or library of) Nanobody sequences will be clear to the person skilled in the art, for example on the basis of the further disclosure herein. Reference is also made to WO 03/054016 and to the review by Hoogenboom in Nature Biotechnology, 23, 9, 1105-1116 (2005).

[0464] In another aspect, the method for generating Nanobody sequences comprises at least the steps of:
[0465] a) providing a collection or sample of cells derived from a species of Camelid that express immunoglobulin sequences;
[0466] b) screening said collection or sample of cells for (i) cells that express an immunoglobulin sequence that can bind to and/or have affinity for VEGF; and (ii) cells that express heavy chain antibodies, in which substeps (i) and (ii) can be performed essentially as a single screening step or in any suitable order as two separate screening steps, so as to provide at least one cell that expresses a heavy chain antibody that can bind to and/or has affinity for VEGF;
   and
[0467] c) either (i) isolating from said cell the V_{HH} sequence present in said heavy chain antibody; or (ii) isolating from said cell a nucleic acid sequence that encodes the V_{HH} sequence present in said heavy chain antibody, followed by expressing said V_{HH} domain.

[0468] In the method according to this aspect, the collection or sample of cells may for example be a collection or sample of B-cells. Also, in this method, the sample of cells may be derived from a Camelid that has been suitably immunized with VEGF or a suitable antigenic determinant based thereon or derived therefrom, such as an antigenic part, fragment, region, domain, loop or other epitope thereof. In one particular aspect, said antigenic determinant may be an extracellular part, region, domain, loop or other extracellular epitope(s).

[0469] The above method may be performed in any suitable manner, as will be clear to the skilled person. Reference is for example made to EP 0 542 810, WO 05/19824, WO 04/051268 and WO 04/106377. The screening of step b) is preferably performed using a flow cytometry technique such as FACS. For this, reference is for example made to Lieby et al., Blood, Vol. 97, No. 12, 3820. Particular reference is made to the so-called “Nanoclone™” technique described in International application WO 06/079372 by Ablynx N.V.

[0470] In another aspect, the method for generating an amino acid sequence directed against VEGF may comprise at least the steps of:
[0471] a) providing a set, collection or library of nucleic acid sequences encoding heavy chain antibodies or Nanobody sequences;
[0472] b) screening said set, collection or library of nucleic acid sequences for nucleic acid sequences that encode a heavy chain antibody or a Nanobody sequence that can bind to and/or has affinity for VEGF;
   and
[0473] c) isolating said nucleic acid sequence, followed by expressing the V_{HH} sequence present in said heavy chain antibody or by expressing said Nanobody sequence, respectively.

[0474] In such a method, the set, collection or library of nucleic acid sequences encoding heavy chain antibodies or Nanobody sequences may for example be a set, collection or library of nucleic acid sequences encoding a naive set, collection or library of heavy chain antibodies or V_{HH} sequences; a set, collection or library of nucleic acid sequences encoding a synthetic or semi-synthetic set, collection or library of Nanobody sequences; and/or a set, collection or library of nucleic acid sequences encoding a set, collection or library of Nanobody sequences that have been subjected to affinity maturation.

[0475] In a preferred aspect of this method, the set, collection or library of amino acid sequences may be an immune set, collection or library of nucleic acid sequences encoding heavy chain antibodies or V_{HH} sequences derived from a Camelid that has been suitably immunized with VEGF or with a suitable antigenic determinant based thereon or derived therefrom, such as an antigenic part, fragment, region, domain, loop or other epitope thereof. In one particular aspect, said antigenic determinant may be an extracellular part, region, domain, loop or other extracellular epitope(s).

[0476] In the above methods, the set, collection or library of nucleotide sequences may be displayed on a phage, phagemid, ribosome or suitable micro-organism (such as yeast), such as to facilitate screening. Suitable methods, techniques and host organisms for displaying and screening (a set, collection or library of) nucleotide sequences encoding amino acid sequences will be clear to the person skilled in the art, for example on the basis of the further disclosure herein. Reference is also made to WO 03/054016 and to the review by Hoogenboom in Nature Biotechnology, 23, 9, 1105-1116 (2005).

[0477] As will be clear to the skilled person, the screening step of the methods described herein can also be performed as a selection step. Accordingly the term “screening” as used in the present description can comprise selection, screening or any suitable combination of selection and/or screening techniques. Also, when a set, collection or library of sequences is used, it may contain any suitable number of sequences, such as 1, 2, 3 or about 5, 10, 50, 100, 500, 1000, 5000, 10⁴, 10⁵, 10⁶, 10⁷, 10⁸ or more sequences.

[0478] Also, one or more or all of the sequences in the above set, collection or library of amino acid sequences may be obtained or defined by rational, or semi-empirical approaches such as computer modelling techniques or biostatics or datamining techniques.

[0479] Furthermore, such a set, collection or library can comprise one, two or more sequences that are variants from one another (e.g. with designed point mutations or with randomized positions), compromise multiple sequences derived from a diverse set of naturally diversified sequences (e.g. an immune library)), or any other source of diverse sequences (as described for example in Hoogenboorn et al, Nat Biotechnol 23:1105, 2005 and Binz et al, Nat Biotechnol 2005, 23:1247). Such set, collection or library of sequences can be displayed on the surface of a phage particle, a ribosome, a bacterium, a yeast cell, a mammalian cell, and linked to the nucleotide sequence encoding the amino acid sequence within these carriers. This makes such set, collection or library amenable to selection procedures to isolate the desired amino acid sequences of the invention. More generally, when a sequence is displayed on a suitable host or host cell, it is also possible (and customary) to first isolate from said host or host cell a nucleotide sequence that encodes the desired sequence, and then to obtain the desired sequence by suitably expressing said nucleotide sequence in a suitable host organism. Again, this can be performed in any suitable manner known per se, as will be clear to the skilled person.

[0480] Yet another technique for obtaining V_{HH} sequences or Nanobody sequences directed against VEGF involves suitably immunizing a transgenic mammal that is capable of expressing heavy chain antibodies (i.e. so as to raise an immune response and/or heavy chain antibodies directed against VEGF), obtaining a suitable biological sample from said transgenic mammal that contains (nucleic acid sequences encoding) said V_{HH} sequences or Nanobody sequences (such as a blood sample, serum sample or sample of B-cells), and then generating V_{HH} sequences directed against VEGF, starting from said sample, using any suitable technique known per se (such as any of the methods described herein or a hybridoma technique). For example, for this purpose, the heavy chain antibody-expressing mice and the further methods and techniques described in WO 02/085945, WO 04/049794 and. WO 06/008548 and Janssens et al., Proc. Natl. Acad. Sci. USA. 2006 Oct. 10; 103(41):15130-5 can be used. For example, such heavy chain antibody expressing mice can express heavy chain antibodies with any suitable (single) variable domain, such as (single) variable domains from natural sources (e.g. human (single) variable domains, Camelid (single) variable domains or shark (single) variable domains), as well as for example synthetic or semi-synthetic (single) variable domains.

[0481] The invention also relates to the V_{HH} sequences or Nanobody sequences that are obtained by the above methods, or alternatively by a method that comprises the one of the above methods and in addition at least the steps of determining the nucleotide sequence or amino acid sequence of said V_{HH} sequence or Nanobody sequence; and of expressing or synthesizing said V_{HH} sequence or Nanobody sequence in a manner known per se, such as by expression in a suitable host cell or host organism or by chemical synthesis.

[0482] As mentioned herein, a particularly preferred class of Nanobodies of the invention comprises Nanobodies with an amino acid sequence that corresponds to the amino acid sequence of a naturally occurring V_{HH} domain, but that has been “humanized”, i.e. by replacing one or more amino acid residues in the amino acid sequence of said naturally occurring V_{HH} sequence (and in particular in the framework sequences) by one or more of the amino acid residues that occur at the corresponding position(s) in a V_{H} domain from a conventional 4-chain antibody from a human being (e.g. indicated above). This can be performed in a manner known per se, which will be clear to the skilled person, for example on the basis of the further description herein and the prior art on humanization referred to herein. Again, it should be noted that such humanized Nanobodies of the invention can be obtained in any suitable manner known per se (i.e. as indicated under points (1)-(8) above) and thus are not strictly limited to polypeptides that have been obtained using a polypeptide that comprises a naturally occurring V_{HH} domain as a starting material.

[0483] Another particularly preferred class of Nanobodies of the invention comprises

[0484] Nanobodies with an amino acid sequence that corresponds to the amino acid sequence of a naturally occurring V_{H} domain, but that has been “camelized”, i.e. by replacing one or more amino acid residues in the amino acid sequence of a naturally occurring NT_{H} domain from a conventional 4-chain antibody by one or more of the amino acid residues that occur at the corresponding position(s) in a V_{HH} domain of a heavy chain antibody. This can be performed in a manner known per se, which will be clear to the skilled person, for example on the basis of the further description herein. Such “camelizing” substitutions are preferably inserted at amino acid positions that form and/or are present at the V_{H}-V_{L} interface, and/or at the so-called Camelidae hallmark residues, as defined herein (see for example WO 94/04678 and Davies and Riechmann (1994 and 1996), supra). Preferably, the V_{H} sequence that is used as a starting material or starting point for generating or designing the camelized Nanobody is preferably a V_{H} sequence from a mammal, more preferably the V_{H} sequence of a human being, such as a V_{H}3 sequence. However, it should be noted that such camelized Nanobodies of the invention can be obtained in any suitable manner known per se (i.e. as indicated under points (1)-(8) above) and thus are not strictly limited to polypeptides that have been obtained using a polypeptide that comprises a naturally occurring V_{H} domain as a starting material.

[0485] For example, again as further described herein, both “humanization” and “camelization” can be performed by providing a nucleotide sequence that encodes a naturally occurring V_{HH} domain or V_{H} domain, respectively, and then changing, in a manner known per se, one or more codons in said nucleotide sequence in such a way that the new nucleotide sequence encodes a “humanized” or “camelized” Nanobody of the invention, respectively. This nucleic acid can then be expressed in a manner known per se, so as to provide the desired Nanobody of the invention. Alternatively, based on the amino acid sequence of a naturally occurring V_{HH} domain or V_{H} domain, respectively, the amino acid sequence of the desired humanized or camelized Nanobody of the invention, respectively, can be designed and then synthesized de novo using techniques for peptide synthesis known per se. Also, based on the amino acid sequence or nucleotide sequence of a naturally occurring V_{HH} domain or V_{H} domain, respectively, a nucleotide sequence encoding the desired humanized or camelized Nanobody of the invention, respectively, can be designed and then synthesized de novo using techniques for nucleic acid synthesis known per se, after which the nucleic acid thus obtained can be expressed in a manner known per se, so as to provide the desired Nanobody of the invention.

[0486] Other suitable methods and techniques for obtaining the Nanobodies of the invention and/or nucleic acids encoding the same, starting from naturally occurring V_{H} sequences or preferably V_{HH} sequences, will be clear from the skilled person, and may for example comprise combining one or more parts of one or more naturally occurring V_{H} sequences (such as one or more FR sequences and/or CDR sequences), one or more parts of one or more naturally occurring V_{HH} sequences (such as one or more FR sequences or CDR sequences), and/or one or more synthetic or semi-synthetic sequences, in a suitable manner, so as to provide a Nanobody of the invention or a nucleotide sequence or nucleic acid encoding the same (which may then be suitably expressed). Nucleotide sequences encoding framework sequences of V_{HH} sequences or Nanobodies will be clear to the skilled person based on the disclosure herein and/or the further prior art cited herein (and/or may alternatively be obtained by PCR starting from the nucleotide sequences obtained using the methods described herein) and may be suitably combined with nucleotide sequences that encode the desired CDR's (for example, by PCR assembly using overlapping primers), so as to provide a nucleic acid encoding a Nanobody of the invention.

[0487] As mentioned herein, Nanobodies may in particular be characterized by the presence of one or more “Hallmark residues” (as described herein) in one or more of the framework sequences.

[0488] Thus, according to one preferred, but non-limiting aspect of the invention, a Nanobody in its broadest sense can be generally defined as a polypeptide comprising:
[0489] a) an amino acid sequence that is comprised of four framework regions/sequences interrupted by three complementarity determining regions/sequences, in which the amino acid residue at position 108 according to the Kabat numbering is Q;
   and/or:
[0490] b) an amino acid sequence that is comprised of four framework regions/sequences interrupted by three complementarity determining regions/sequences, in which the amino acid residue at position 45 according to the Kabat numbering is a charged amino acid (as defined herein) or a cysteine residue, and position 44 is preferably an E;
   and/or:
[0491] c) an amino acid sequence that is comprised of four framework regions/sequences interrupted by three complementarity determining regions/sequences, in which the amino acid residue at position 103 according to the Kabat numbering is chosen from the group consisting of P, R and S, and is in particular chosen from the group consisting of R and S.

[0492] Thus, in a first preferred, but non-limiting aspect, a Nanobody of the invention may have the structure
[0493] FR1-CDR1-FR2-CDR2-FR3-CDR3-FR4
   in which FR1 to FR4 refer to framework, regions 1 to 4, respectively, and in which CDR1 to CDR3 refer to the complementarity determining regions 1 to 3, respectively, and in which
[0494] a) the amino acid residue at position 108 according to the Kabat numbering is Q;
   and/or in which:
[0495] b) the amino acid residue at position 45 according to the Kabat numbering is a charged amino acid or a cysteine and the amino acid residue at position 44 according to the Kabat numbering is preferably E;
   and/or in which:
[0496] c) the amino acid residue at position 103 according to the Kabat numbering is chosen from the group consisting of P, R and 5, and is in particular chosen from the group consisting of R and S;
   and in which:
[0497] d) CDR1, CDR2 and CDR3 are as defined herein, and are preferably as defined according to one of the preferred aspects herein, and are more preferably as defined according to one of the more preferred aspects herein.

[0498] In particular, a Nanobody in its broadest sense can be generally defined as a polypeptide comprising:
[0499] a) an amino acid sequence that is comprised of four framework regions/sequences interrupted by three complementarity determining regions/sequences, in which the amino acid residue at position 108 according to the Kabat numbering is Q;
   and/or:
[0500] b) an amino acid sequence that is comprised of four framework regions/sequences interrupted by three complementarity determining regions/sequences, in which the amino acid residue at position 44 according to the Kabat numbering is E and in which the amino acid residue at position 45 according to the Kabat numbering is an R;
   and/or:
[0501] c) an amino acid sequence that is comprised of four framework regions/sequences interrupted by three complementarity determining regions/sequences, in which the amino acid residue at position 103 according to the Kabat numbering is chosen from the group consisting of P, R and S, and is in particular chosen from the group consisting of R and S.

[0502] Thus, according to a preferred, but non-limiting aspect, a Nanobody of the invention may have the structure
[0503] FR1-CDR1-FR2-CDR2-FR3-CDR3-FR4
   in which FR1 to FR4 refer to framework regions 1 to 4, respectively, and in which CDR1 to CDR3 refer to the complementarity determining regions 1 to 3, respectively, and in which
[0504] a) the amino acid residue at position 108 according to the Kabat numbering is Q;
   and/or in which:
[0505] b) the amino acid residue at position 44 according to the Kabat numbering is E and in which the amino acid residue at position 45 according to the Kabat numbering is an R;
   and/or in which:
[0506] c) the amino acid residue at position 103 according to the Kabat numbering is chosen from the group consisting of P, R and S, and is in particular chosen from the group consisting of R and S;
   and in which:
[0507] d) CDR1, CDR2 and CDR3 are as defined herein, and are preferably as defined according to one of the preferred aspects herein, and are more preferably as defined according to one of the more preferred aspects herein.

[0508] In particular, a Nanobody against VEGF according to the invention may have the structure:
[0509] FR1-CDR1-FR2-CDR2-FR3-CDR3-FR4
   in which FR1 to FR4 refer to framework regions 1 to 4, respectively, and in which CDR1 to CDR3 refer to the complementarity determining regions 1 to 3, respectively, and in which
[0510] a) the amino acid residue at position 108 according to the Kabat numbering is Q;
   and/or in which:
[0511] b) the amino acid residue at position 44 according to the Kabat numbering is E and in which the amino acid residue at position 45 according to the Kabat numbering is an R;
   and/or in which:
[0512] c) the amino acid residue at position 103 according to the Kabat numbering is chosen from the group consisting of P, R and S, and is in particular chosen from the group consisting of R and S;
   and in which:
[0513] d) CDR1, CDR2 and CDR3 are as defined herein, and are preferably as defined according to one of the preferred aspects herein, and are more preferably as defined according to one of the more preferred aspects herein.

[0514] In particular, according to one preferred, but non-limiting aspect of the invention, a Nanobody can generally be defined as a polypeptide comprising an amino acid sequence that is comprised of four framework regions/sequences interrupted by three complementarity determining regions/sequences, in which;
[0515] a-1) the amino acid residue at position 44 according to the Kabat numbering is chosen from the group consisting of A, G, E, D, G, Q, R, S, L; and is preferably chosen from the group consisting of G, E or Q; and
[0516] a-2) the amino acid residue at position 45 according to the Kabat numbering is chosen from the group consisting of L, R or C; and is preferably chosen from the group consisting of L or R; and
[0517] a-3) the amino acid residue at position 103 according to the Kabat numbering is chosen from the group consisting of W, R or S; and is preferably W or R, and is most preferably W;
[0518] a-4) the amino acid residue at position 108 according to the Kabat numbering is Q; or in which:
[0519] b-1) the amino acid residue at position 44 according to the Kabat numbering is chosen from the group consisting of E and Q; and
[0520] b-2) the amino acid residue at position 45 according to the Kabat numbering is R; and
[0521] b-3) the amino acid residue at position 103 according to the Kabat numbering is chosen from the group consisting of W, R and S; and is preferably W;
[0522] b-4) the amino acid residue at position 108 according to the Kabat numbering is chosen from the group consisting of Q and L; and is preferably Q;
   or in which:
[0523] c-1) the amino acid residue at position 44 according to the Kabat numbering is chosen from the group consisting of A, G, E, D, Q, R, S and L; and is preferably chosen from the group consisting of G, E and Q; and
[0524] c-2) the amino acid residue at position 45 according to the Kabat numbering is chosen from the group consisting of L, R and C; and is preferably chosen from the group consisting of L and R; and
[0525] c-3) the amino acid residue at position 103 according to the Kabat numbering is chosen from the group consisting of P, R and S; and is in particular chosen from the group consisting of R and S; and
[0526] c-4) the amino acid residue at position 108 according to the Kabat numbering is chosen from the group consisting of Q and L; is preferably Q;
   and in which
[0527] d) CDR1, CDR2 and CDR3 are as defined herein, and are preferably as defined according to one of the preferred aspects herein, and are more preferably as defined according to one of the more preferred aspects herein.

[0528] Thus, in another preferred, but non-limiting aspect, a Nanobody of the invention may have the structure
[0529] FR1-CDR1-FR2-CDR2-FR3-CDR3-FR4
   in which FR1 to FR4 refer to framework regions 1 to 4, respectively, and in which CDR1 to CDR3 refer to the complementarity determining regions 1 to 3, respectively, and in which:
[0530] a-1) the amino acid residue at position 44 according to the Kabat numbering is chosen from the group consisting of A, G, E, D, G, Q, R, S, L; and is preferably chosen from the group consisting of G, E or Q;
   and in which:
[0531] a-2) the amino acid residue at position 45 according to the Kabat numbering is chosen from the group consisting of L, R or C; and is preferably chosen from the group consisting of L or R;
   and in which:
[0532] a-3) the amino acid residue at position 103 according to the Kabat numbering is chosen from the group consisting of W, R or S; and is preferably W or R, and is most preferably W;
   and in which
[0533] a-4) the amino acid residue at position 108 according to the Kabat numbering is Q;
   and in which:
[0534] d) CDR1, CDR2 and CDR3 are as defined herein, and are preferably as defined according to one of the preferred aspects herein, and are more preferably as defined according to one of the more preferred aspects herein.

[0535] In another preferred, but non-limiting aspect, a Nanobody of the invention may have the structure
[0536] ZR1-CDR1-FR2-CDR2-FR3-CDR3-FR4
   in which FR1 to FR4 refer to framework regions 1 to 4, respectively, and in which CDR1 to CDR3 refer to the complementarity determining regions 1 to 3, respectively, and in which:
[0537] b-1) the amino acid residue at position 44 according to the Kabat numbering is chosen from the group consisting of E and Q;
   and in which:
[0538] b-2) the amino acid residue at position 45 according to the Kabat numbering is R; and in which:
[0539] b-3) the amino acid residue at position 103 according to the Kabat numbering is chosen from the group consisting of W, R and S; and is preferably W;
   and in which:
[0540] b-4) the amino acid residue at position 108 according to the Kabat numbering is chosen from the group consisting of Q and L; and is preferably Q;
   and in which:
[0541] d) CDR1, CDR2 and CDR3 are as defined herein, and are preferably as defined according to one of the preferred aspects herein, and are more preferably as defined according to one of the more preferred aspects herein.

[0542] In another preferred, but non-limiting aspect, a Nanobody of the invention may have the structure
[0543] FR 1-CDR1-FR2-CDR2-FR3-CDR3-FR4
   in which FR1 to FR4 refer to framework regions 1 to 4, respectively, and in which CDR1 to CDR3 refer to the complementarity determining regions 1 to 3, respectively, and in which:
[0544] c-1) the amino acid residue at position 44 according to the Kabat numbering is chosen from the group consisting of A, G, E, D, Q, R, S and L; and is preferably chosen from the group consisting of G, E and Q;
   and in which:
[0545] c-2) the amino acid residue at position 45 according to the Kabat numbering is chosen from the group consisting of L, R and C; and is preferably chosen from the group consisting of L and R;
   and in which:
[0546] c-3) the amino acid residue at position 103 according to the Kabat numbering is chosen from the group consisting of P, R and S; and is in particular chosen from the group consisting of R and S;
   and in which:
[0547] c-4) the amino acid residue at position 108 according to the Kabat numbering is chosen from the group consisting of Q and L; is preferably Q;
   and in which:
[0548] d) CDR1, CDR2 and CDR3 are as defined herein, and are preferably as defined according to one of the preferred aspects herein, and are more preferably as defined according to one of the more preferred aspects herein.

[0549] Two particularly preferred, but non-limiting groups of the Nanobodies of the invention are those according to a) above; according to (a-1) to (a-4) above; according to b) above; according to (b-1) to (b-4) above; according to (c) above; and/or according to (c-1) to (c-4) above, in which either:
[0550] i) the amino acid residues at positions 44-47 according to the Kabat numbering form the sequence GLEW (or a GLEW-like sequence as described herein) and the amino acid residue at position 108 is Q;
   or in which:
[0551] ii) the amino acid residues at positions 43-46 according to the Kabat numbering form the sequence KERE or KQRE (or a KERE-like sequence as described) and the amino acid residue at position 108 is Q or L, and is preferably Q.

[0552] Thus, in another preferred, but non-limiting aspect, a Nanobody of the invention may have the structure
[0553] FR 1-CDR1-FR2-CDR2-FR3-CDR3-FR4
   in which FR1 to FR4 refer to framework regions 1 to 4, respectively, and in which CDR1 to CDR3 refer to the complementarity determining regions 1 to 3, respectively, and in which:
[0554] i) the amino acid residues at positions 44-47 according to the Kabat numbering form the sequence GLEW (or a GLEW-like sequence as defined herein) and the amino acid residue at position 108 is Q;
   and in which:
[0555] ii) CDR1, CDR2 and CDR3 are as defined herein, and are preferably as defined according to one of the preferred aspects herein, and are more preferably as defined according to one of the more preferred aspects herein.

[0556] In another preferred, but non-limiting aspect, a Nanobody of the invention may have the structure
[0557] FR1-CDR1-FR2-CDR2-FR3-CDR3-FR4
   in which FR1 to FR4 refer to framework regions 1 to 4, respectively, and in which CDR1 to CDR3 refer to the complementarity determining regions 1 to 3, respectively, and in which:
[0558] i) the amino acid residues at positions 43-46 according to the Kabat numbering form the sequence KERE or KQRE (or a KERE-like sequence) and the amino acid residue at position 108 is Q or L, and is preferably Q;
   and in which:
[0559] ii) CDR1, CDR2 and CDR3 are as defined herein, and are preferably as defined according to one of the preferred aspects herein, and are more preferably as defined according to one of the more preferred aspects herein.

[0560] In the Nanobodies of the invention in which the amino acid residues at positions 43-46 according to the Kabat numbering form the sequence KERE or KQRE, the amino acid residue at position 37 is most preferably F. In the Nanobodies of the invention in which the amino acid residues at positions 44-47 according to the Kabat numbering form the sequence GLEW, the amino acid residue at position 37 is chosen from the group consisting of Y, H, I, L, V or F, and is most preferably V.

[0561] Thus, without being limited hereto in any way, on the basis of the amino acid residues present on the positions mentioned above, the Nanobodies of the invention can generally be classified on the basis of the following three groups:
[0562] i) The “GLEW-group”: Nanobodies with the amino acid sequence GLEW at positions 44-47 according to the Kabat numbering and Q at position 108 according to the Kabat numbering. As further described herein, Nanobodies within this group usually have a V at position 37, and can have a W, P, R or S at position 103, and preferably have a W at position 103. The GLEW group also comprises some GLEW-like sequences such as those mentioned in Table A-3 below. More generally, and without limitation, Nanobodies belonging to the GLEW-group can be defined as Nanobodies with a G at position 44 and/or with a W at position 47, in which position 46 is usually E and in which preferably position 45 is not a charged amino acid residue and not cysteine;
[0563] ii) The “KERE-group”: Nanobodies with the amino acid sequence KERE or KQRE (or another KERE-like sequence) at positions 43-46 according to the Kabat numbering and Q or L at position 108 according to the Kabat numbering. As further described herein, Nanobodies within this group usually have a F at position 37, an L or F at position 47; and can have a W, P, R or S at position 103, and preferably have a W at position 103. More generally, and without limitation, Nanobodies belonging to the KERE-group can be defined as Nanobodies with a K, Q or R at position 44 (usually K) in which position 45 is a charged amino acid residue or cysteine, and position 47 is as further defined herein;
[0564] iii) The “103 P, R, S-group”: Nanobodies with a P, R or S at position 103. These Nanobodies can have either the amino acid sequence GLEW at positions 44-47 according to the Kabat numbering or the amino acid sequence KERE or KQRE at positions 43-46 according to the Kabat numbering, the latter most preferably in combination with an F at position 37 and an L or an F at position 47 (as defined for the KERE-group); and can have Q or L at position 108 according to the Kabat numbering, and preferably have Q.

[0565] Also, where appropriate, Nanobodies may belong to (i.e. have characteristics of) two or more of these classes. For example, one specifically preferred group of Nanobodies has GLEW or a GLEW-like sequence at positions 44-47; P, R or S (and in particular R) at position 103; and Q at position 108 (which may be humanized to L).

[0566] More generally, it should be noted that the definitions referred to above describe and apply to Nanobodies in the form of a native (i.e. non-humanized) V_{HH} sequence, and that humanized variants of these Nanobodies may contain other amino acid residues than those indicated above (i.e. one or more humanizing substitutions as defined herein). For example, and without limitation, in some humanized Nanobodies of the GLEW-group or the 103 P, R, S-group, Q at position 108 may be humanized to 108L. As already mentioned herein, other humanizing substitutions (and suitable combinations thereof) will become clear to the skilled person based on the disclosure herein. In addition, or alternatively, other potentially useful humanizing substitutions can be ascertained by comparing the sequence of the framework regions of a naturally occurring V_{HH} sequence with the corresponding framework sequence of one or more closely related human V_{H} sequences, after which one or more of the potentially useful humanizing substitutions (or combinations thereof) thus determined can be introduced into said V_{HH} sequence (in any manner known per se, as further described herein) and the resulting humanized V_{HH} sequences can be tested for affinity for the target, for stability, for ease and level of expression, and/or for other desired properties. In this way, by means of a limited degree of trial and error, other suitable humanizing substitutions (or suitable combinations thereof) can be determined by the skilled person based on the disclosure herein. Also, based on the foregoing, (the framework regions of) a Nanobody may be partially humanized or fully humanized.

[0567] Thus, in another preferred, but non-limiting aspect, a Nanobody of the invention may be a Nanobody belonging to the GLEW-group (as defined herein), and in which CDR], CDR2 and CDR3 are as defined herein, and are preferably as defined according to one of the preferred aspects herein, and are more preferably as defined according to one of the more preferred aspects herein.

[0568] In another preferred, but non-limiting aspect, a Nanobody of the invention may be a Nanobody belonging to the KERE-group (as defined herein), and CDR1, CDR2 and CDR3 are as defined herein, and are preferably as defined according to one of the preferred aspects herein, and are more preferably as defined according to one of the more preferred aspects herein.

[0569] Thus, in another preferred, but non-limiting aspect, a Nanobody of the invention may be a Nanobody belonging to the 103 P, R, S-group (as defined herein), and in which CDR1, CDR2 and CDR3 are as defined herein, and are preferably as defined according to one of the preferred aspects herein, and are more preferably as defined according to one of the more preferred aspects herein.

[0570] Also, more generally and in addition to the 108Q, 43E/44R and 103 P, R, S residues mentioned above, the Nanobodies of the invention can contain, at one or more positions that in a conventional V_{H} domain would form (part of) the V_{H}/V_{L} interface, one or more amino acid residues that are more highly charged than the amino acid residues that naturally occur at the same position(s) in the corresponding naturally occurring V_{H} sequence, and in particular one or more charged amino acid residues (as mentioned in Table A-2). Such substitutions include, but are not limited to, the GLEW-like sequences mentioned in Table A-3 below; as well as the substitutions that are described in the International Application WO 00/29004 for so-called “microbodies”, e.g. so as to obtain a Nanobody with Q at position 108 in combination with KLEW at positions 44-47. Other possible substitutions at these positions will be clear to the skilled person based upon the disclosure herein.

[0571] In one aspect of the Nanobodies of the invention, the amino acid residue at position 83 is chosen from the group consisting of L, M, S, V and W; and is preferably L.

[0572] Also, in one aspect of the Nanobodies of the invention, the amino acid residue at position 83 is chosen from the group consisting of R, K, N, E, G, I, T and Q; and is most preferably either K or E (for Nanobodies corresponding to naturally occurring V_{HH} domains) or R (for “humanized” Nanobodies, as described herein). The amino acid residue at position 84 is chosen from the group consisting of P, A, R, S, D T, and V in one aspect, and is most preferably P (for Nanobodies corresponding to naturally occurring V_{HH} domains) or R (for “humanized” Nanobodies, as described herein).

[0573] Furthermore, in one aspect of the Nanobodies of the invention, the amino acid residue at position 104 is chosen from the group consisting of G and D; and is most preferably G.

[0574] Collectively, the amino acid residues at positions 11, 37, 44, 45, 47, 83, 84, 103, 104 and 108, which in the Nanobodies are as mentioned above, will also be referred to herein as the “Hallmark Residues”. The Hallmark Residues and the amino acid residues at the corresponding positions of the most closely related human V_{H} domain, V_{H}3, are summarized in Table A-3.

[0575] Some especially preferred but non-limiting combinations of these Hallmark Residues as occur in naturally occurring V_{HH} domains are mentioned in Table A-4. For comparison, the corresponding amino acid residues of the human V_{H}3 called DP-47 have been indicated in italics.

TABLE A-3
Hallmark Residues in Nanobodies

| Position | Human V_{H}3 | Hallmark Residues |
|---|---|---|
| 11 | L, V; predominantly L | L, M, S, V, W; preferably L |
| 37 | V, I, F; usually V | F⁽¹⁾, Y, H, I, L or V, preferably F⁽¹⁾ or Y |
| 44⁽⁸⁾ | G | G⁽²⁾, E⁽³⁾, A, D, Q, R, S, L; |
| | | preferably G⁽²⁾, E⁽³⁾ or Q; |
| | | most preferably G⁽²⁾ or E⁽³⁾. |
| 45⁽⁸⁾ | L | L⁽²⁾, R⁽³⁾, C, I, L, P, Q, V; preferably L⁽²⁾ |
| | | or R⁽³⁾ |
| 47⁽⁸⁾ | W, Y | W⁽²⁾, L⁽¹⁾ or F⁽¹⁾, A, G, I, M, R, S, V or |
| | | Y; preferably W⁽²⁾, L⁽¹⁾, F⁽¹⁾ or R |
| 83 | R or K; usually R | R, K⁽⁵⁾, N, E⁽⁵⁾, G, I, M, Q or T; |
| | | preferably K or R; most preferably K |
| 84 | A, T, D; predominantly A | P⁽⁵⁾, A, L, R, S, T, D, V; preferably P |
| 103 | W | W⁽⁴⁾, P⁽⁶⁾, R⁽⁶⁾, S; preferably W |
| 104 | G | G or D; preferably G |
| 108 | L, M or T; predominantly L | Q, L⁽⁷⁾ or R; preferably Q or L⁽⁷⁾ |

Notes:
⁽¹⁾In particular, but not exclusively, in combination with KERE or KQRE at positions 43-46.
⁽²⁾Usually as GLEW at positions 44-47.
⁽³⁾Usually as KERE or KQRE at positions 43-46, e.g. as KEREL, KEREF, KQREL, KQREF or KEREG at positions 43-47. Alternatively, also sequences such as TERE (for example TEREL), KECE (for example KECEL or KECER), RERE (for example REREG), QERE (for example QEREG), KGRE (for example KGREG), KDRE (for example KDREV) are possible. Some other possible, but less preferred sequences include for example DECKL and NVCEL.
⁽⁴⁾With both GLEW at positions 44-47 and KERE or KQRE at positions 43-46.
⁽⁵⁾Often as KP or EP at positions 83-84 of naturally occurring V_{HH} domains.
⁽⁶⁾In particular, but not exclusively, in combination with GLEW at positions 44-47.
⁽⁷⁾With the proviso that when positions 44-47 are GLEW, position 108 is always Q in (non-humanized) V_{HH} sequences that also contain a W at position 103.
⁽⁸⁾The GLEW group also contains GLEW-like sequences at positions 44-47, such as for example GVEW, EPEW, GLER, DQEW, DLEW, GIEW, ELEW, GPEW, EWLP, GPER, GLER and ELEW.

TABLE A-4
Some preferred but non-limiting combinations of
Hallmark Residues in naturally occurring
Nanobodies.
For humanization of these combinations,
reference is made to the specification.

| | 11 | 37 | 44 | 45 | 47 | 83 | 84 | 103 | 104 | 108 |
|---|---|---|---|---|---|---|---|---|---|---|
| DP-47(human) | M | V | G | L | W | R | A | W | G | L |
| “KERE” group | L | F | E | R | L | K | P | W | G | Q |
| | L | F | E | R | F | E | P | W | G | Q |
| | L | F | E | R | F | K | P | W | G | Q |
| | L | Y | Q | R | L | K | P | W | G | Q |
| | L | F | L | R | V | K | P | Q | G | Q |
| | L | F | Q | R | L | K | P | W | G | Q |
| | L | F | E | R | F | K | P | W | G | Q |
| “GLEW” group | L | V | G | L | W | K | S | W | G | Q |
| | M | V | G | L | W | K | P | R | G | Q |

[0576] In the Nanobodies, each amino acid residue at any other position than the Hallmark Residues can be any amino acid residue that naturally occurs at the corresponding position (according to the Kabat numbering) of a naturally occurring V_{HH} domain.

[0577] Such amino acid residues will be clear to the skilled person. Tables A-5 to A-8 mention some non-limiting residues that can be present at each position (according to the Kabat numbering) of the FR1, FR2, FR3 and FR4 of naturally occurring V_{HH} domains. For each position, the amino acid residue that most frequently occurs at each position of a naturally occurring V_{HH} domain (and which is the most preferred amino acid residue for said position in a Nanobody) is indicated in bold; and other preferred amino acid residues for each position have been underlined (note: the number of amino acid residues that are found at positions 26-30 of naturally occurring V_{HH} domains supports the hypothesis underlying the numbering by Chothia (supra) that the residues at these positions already form part of CDR I).

[0578] In Tables A-5-A-8, some of the non-limiting residues that can be present at each position of a human V_{H}3 domain have also been mentioned. Again, for each position, the amino acid residue that most frequently occurs at each position of a naturally occurring human V_{H}3 domain is indicated in bold; and other preferred amino acid residues have been underlined.

[0579] For reference only, Tables A-5-A-8 also contain data on the Vₐₙ entropy (“V_{HH} Ent.”) and V_{HH} variability (“V_{HH} Var.”) at each amino acid position for a representative sample of 1118 V_{HH} sequences (data kindly provided by David Lutje Hulsing and Prof. Theo Verrips of Utrecht University). The values for the V_{HH} entropy and the V_{HH} variability provide a measure for the variability and degree of conservation of amino acid residues between the 1118 V_{HH} sequences analyzed: low values (i.e. <1, such as <0.5) indicate that an amino acid residue is highly conserved between the V_{HH} sequences (i.e. little variability). For example, the G at position 8 and the G at position 9 have values for the V_{HH} entropy of 0.1 and 0 respectively, indicating that these residues are highly conserved and have little variability (and in case of position 9 is G in all 1118 sequences analysed), whereas for residues that form part of the CDR's generally values of 1.5 or more are found (data not shown). Note that (1) the amino acid residues listed in the second column of Tables A-5-A-8 are based on a bigger sample than the 1118 V_{HH} sequences that were analysed for determining the V_{HH} entropy and V_{HH} variability referred to in the last two columns; and (2) the data represented below support the hypothesis that the amino acid residues at positions 27-30 and maybe even also at positions 93 and 94 already form part of the CDR's (although the invention is not limited to any specific hypothesis or explanation, and as mentioned above, herein the numbering according to Rabat is used). For a general explanation of sequence entropy, sequence variability and the methodology for determining the same, see Oliveira et al., PROTEINS: Structure, Function and Genetics, 52: 544-552 (2003).

TABLE A-5
Non-limiting examples of amino acid residues in
FR1 (for the footnotes, see the footnotes to
Table A-3)

| | Amino acid residue(s): | | V_{HH} | V_{HH} |
|---|---|---|---|---|
| Pos. | Human V_{H}3 | Camelid V_{HH}'s | Ent. | Var. |
| 1 | E, Q | Q, A, E | — | — |
| 2 | V | V | 0.2 | 1 |
| 3 | Q | Q, K | 0.3 | 2 |
| 4 | L | L | 0.1 | 1 |
| 5 | V, L | Q, E, L, V | 0.8 | 3 |
| 6 | E | E, D, Q, A | 0.8 | 4 |
| 7 | S, T | S, F | 0.3 | 2 |
| 8 | G, R | G | 10.1 | 1 |
| 9 | G | G | 0 | 1 |
| 10 | G, V | G, D, R | 0.3 | 2 |
| 11 | Hallmark residue: L, M, S, V, W; | | 0.8 | 2 |
| | preferably L | | | |
| 12 | V, I | V, A | 0.2 | 2 |
| 13 | Q, K, R | Q, E, K, P, R | 0.4 | 4 |
| 14 | P | A, Q, A, G, S, T, V | 1 | 5 |
| 15 | G | G | 0 | 1 |
| 16 | G, R | G, A, E, D | 0.4 | 3 |
| 17 | S | S, F | 0.5 | 2 |
| 18 | L | L, V | 0.1 | 1 |
| 19 | R, K | R, K, L, N, S, T | 0.6 | 4 |
| 20 | L | L, F, I, V | 0.5 | 4 |
| 21 | S | S, A, F, T | 0.2 | 3 |
| 22 | C | C | 0 | 1 |
| 23 | A, T | A, D, E, P, S, T, V | 1.3 | 5 |
| 24 | A | A, I, L, S, T, V | 1 | 6 |
| 25 | S | S, A, F, P, T | 0.5 | 5 |
| 26 | G | G, A, D, E, R, S, T, V | 0.7 | 7 |
| 27 | F | S, F, R, L, P, G, N, | 2.3 | 13 |
| 28 | T | N, T, E, D, S, I, R, A, G, | 1.7 | 11 |
| | | R, F, Y | | |
| 29 | F, V | F, L, D, S, I, G, V, A | 1.9 | 11 |
| 30 | S, D, G | N, S, E, G, A, D, M, T | 1.8 | 11 |

TABLE A-6
Non-limiting examples of amino acid residues in
FR2 (for the footnotes, see the footnotes to
Table A-3)

| | Amino acid residue(s): | | V_{HH} | V_{HH} |
|---|---|---|---|---|
| Pos. | Human V_{H}3 | Camelid V_{HH}'s | Ent. | Var. |
| 36 | W | W | 0.1 | 1 |
| 37 | Hallmark residue: F⁽¹⁾, H, I, L, Y | | 1.1 | 6 |
| | or V, preferably F⁽¹⁾ or Y | | | |
| 38 | R | R | 0.2 | 1 |
| 39 | Q | Q, H, P, R | 0.3 | 2 |
| 40 | A | A, F, G, L, P, T, V | 0.9 | 7 |
| 41 | P, S, T | P, A, L, S | 0.4 | 3 |
| 42 | G | G, E | 0.2 | 2 |
| 43 | K | K, D, E, N, Q, R, T, V | 0.7 | 6 |
| 44 | Hallmark residue: G⁽²⁾, E⁽³⁾, A, D, | | 1.3 | 5 |
| | Q, R, S, L; preferably G⁽²⁾, E⁽³⁾ or | | | |
| | Q; most preferably G⁽²⁾ or E⁽³⁾ | | | |
| 45 | Hallmark residue: L⁽²⁾, R⁽³⁾, C, I, | | 0.6 | 4 |
| | L, P, Q, V; preferably L⁽²⁾ or R⁽³⁾ | | | |
| 46 | E, V | E, D, K, Q, V | 0.4 | 2 |
| 47 | Hallmark residue: W⁽²⁾, L⁽¹⁾ or | | 1.9 | 9 |
| | F⁽¹⁾, A, G, I, M, R, S, V or Y; | | | |
| | preferably W⁽²⁾, L⁽¹⁾, F⁽¹⁾ or R | | | |
| 48 | V | V, I, L | 0.4 | 3 |
| 49 | S, A, G | A, S, G, T, V | 0.8 | 3 |

TABLE A-7
Non-limiting examples of amino acid residues in
FR3 (for the footnotes, see the footnotes to
Table A-3)

| | Amino acid residue(s): | | V_{HH} | V_{HH} |
|---|---|---|---|---|
| Pos. | Human V_{H}3 | Camelid V_{HH}'s | Ent. | Var. |
| 66 | R | R | 0.1 | 1 |
| 67 | F | F, L, V | 0.1 | 1 |
| 68 | T | T, A, N, S | 0.5 | 4 |
| 69 | I | I, L, M, V | 0.4 | 4 |
| 70 | S | S, A, F, T | 0.3 | 4 |
| 71 | R | R, G, H, I, L, K, Q, S, T, | 1.2 | 8 |
| | | W | | |
| 72 | D, E | D, E, G, N, V | 0.5 | 4 |
| 73 | N, D, G | N, A, D, F, I, K, L, R, S, | 1.2 | 9 |
| | | T, V, Y | | |
| 74 | A, S | A, D, G, N, P, S, T, V | 1 | 7 |
| 75 | K | K, A, E, K, L, N, Q, R | 0.9 | 6 |
| 76 | N, S | N, D, K, R, S, T, Y | 0.9 | 6 |
| 77 | S, T, I | T, A, E, I, M, P, S | 0.8 | 5 |
| 78 | L, A | V, L, A, F, G, I, M | 1.2 | 5 |
| 79 | Y, H | Y, A, D, F, H, N, S, T | 1 | 7 |
| 80 | L | L, F, V | 0.1 | 1 |
| 81 | Q | Q, E, I, L, R, T | 0.6 | 5 |
| 82 | M | M, I, L, V | 0.2 | 2 |
| 82a | N, G | N, D, G, H, S, T | 0.8 | 4 |
| 82b | S | S, N, D, G, R, T | 1 | 6 |
| 82c | L | L, P, V | 0.1 | 2 |
| 83 | Hallmark residue: R, K⁽⁵⁾, N, E^{(5),} | | 0.9 | 7 |
| | G, I, M, Q or T; preferably K or R; | | | |
| | most preferably K | | | |
| 84 | Hallmark residue: P⁽⁵⁾, A, D, L, R, | | 0.7 | 6 |
| | S, T, V; preferably P | | | |
| 85 | E, G | E, D, G, Q | 0.5 | 3 |
| 86 | D | D | 0 | 1 |
| 87 | T, M | T, A, S | 0.2 | 3 |
| 88 | A | A, G, S | 0.3 | 2 |
| 89 | V, L | V, A, D, I, L, M, N, R, T | 1.4 | 6 |
| 90 | Y | Y, F | 0 | 1 |
| 91 | Y, H | Y, D, F, H, L, S, T, V | 0.6 | 4 |
| 92 | C | C | 0 | 1 |
| 93 | A, K, T | A, N, G, H, K, N, R, S, T, V, Y | 1.4 | 10 |
| 94 | K, R, T | A, V, C, F, G, I, K, L, R, S or T | 1.6 | 9 |

TABLE A-8
Non-limiting examples of amino acid residues
in FR4 (for the footnotes, see the footnotes
to Table A-3)

| | Amino acid residue(s): | | V_{HH} | V_{HH} |
|---|---|---|---|---|
| Pos. | Human V_{H}3 | Camelid V_{HH}'s | Ent. | Var. |
| 103 | Hallmark residue: W⁽⁴⁾, P⁽⁶⁾, R⁽⁶⁾, | | 0.4 | 2 |
| | S; preferably W | | | |
| 104 | Hallmark residue: G or D; prefer- | | 0.1 | 1 |
| | ably G | | | |
| 105 | Q, R | Q, E, K, P, R | 0.6 | 4 |
| 106 | G | G | 0.1 | 1 |
| 107 | T | T, A, I | 0.3 | 2 |
| 108 | Hallmark residue: Q, L⁽⁷⁾ or R; | | 0.4 | 3 |
| | preferably Q or L⁽⁷⁾ | | | |
| 109 | V | V | 0.1 | 1 |
| 110 | T | T, I, A | 0.2 | 1 |
| 111 | V | V, A, I | 0.3 | 2 |
| 112 | S | S, F | 0.3 | 1 |
| 113 | S | S, A, L, P, T | 0.4 | 3 |

[0580] Thus, in another preferred, but not limiting aspect, a Nanobody of the invention can be defined as an amino acid sequence with the (general) structure
[0581] FR1-CDR1-FR2-CDR2-FR3-CDR3-FR4
   in which FR1 to FR4 refer to framework regions 1 to 4, respectively, and in which CDR1 to CDR3 refer to the complementarity determining regions 1 to 3, respectively, and in which:
[0582] i) one or more of the amino acid residues at positions 11, 37, 44, 45, 47, 83, 84, 103, 104 and 108 according to the Kabat numbering are chosen from the Hallmark residues mentioned in Table A-3;
   and in which:
[0583] ii) CDR1 CDR2 and CDR3 are as defined herein, and are preferably as defined according to one of the preferred aspects herein, and are more preferably as defined according to one of the more preferred aspects herein.

[0584] The above Nanobodies may for example be V_{HH} sequences or may be humanized Nanobodies. When the above Nanobody sequences are V_{HH} sequences, they may be suitably humanized, as further described herein. When the Nanobodies are partially humanized Nanobodies, they may optionally be further suitably humanized, again as described herein.

[0585] In particular, a Nanobody of the invention can be an amino acid sequence with the (general) structure
[0586] FR 1-CDR1-FR2-CDR2-FR3-CDR3-FR4
   in which FR1 to FR4 refer to framework regions 1 to 4, respectively, and in which CDR1 to CDR3 refer to the complementarity determining regions 1 to 3, respectively, and in which:
[0587] i) (preferably) one or more of the amino acid residues at positions 11, 37, 44, 45, 47, 83, 84, 103, 104 and 108 according to the Kabat numbering are chosen from the Hallmark residues mentioned in Table A-3 (it being understood that V_{HH} sequences will contain one or more Hallmark residues; and that partially humanized Nanobodies will usually, and preferably, [still] contain one or more Hallmark residues [although it is also within the scope of the invention to provide—where suitable in accordance with the invention—partially humanized Nanobodies in which all Hallmark residues, but not one or more of the other amino acid residues, have been humanized]; and that in fully humanized Nanobodies, where suitable in accordance with the invention, all amino acid residues at the positions of the Hallmark residues will be amino acid residues that occur in a human V_{H}3 sequence. As will be clear to the skilled person based on the disclosure herein that such V_{HH} sequences, such partially humanized Nanobodies with at least one Hallmark residue, such partially humanized Nanobodies without Hallmark residues and such fully humanized Nanobodies all form aspects of this invention);
   and in which:
[0588] ii) said amino acid sequence has at least 80% amino acid identity with at least one of he amino acid sequences of SEQ ID NO's: 1 to 22, in which for the purposes of determining the degree of amino acid identity, the amino acid residues that form the CDR sequences (indicated with X in the sequences of SEQ ID NO's: 1 to 22) are disregarded;
   and in which:
[0589] iii) CDR1, CDR2 and CDR3 are as defined herein, and are preferably as defined according to one of the preferred aspects herein, and are more preferably as defined according to one of the more preferred aspects herein.

[0590] The above Nanobodies may for example be V_{HH} sequences or may be humanized Nanobodies. When the above Nanobody sequences are V_{HH} sequences, they may be suitably humanized, as further described herein. When the Nanobodies are partially humanized Nanobodies, they may optionally be further suitably humanized, again as described herein.

TABLE A-9

Representative amino acid sequences for Nanobodies of the KERE,
GLEW and P, R, S 103 group. The CDR's are indicated with XXXX

| | | |
|---|---|---|
| KERE sequence no. 1 | SEQ ID NO: 1 | EVQLVESGGGLVQPGGSLRLSCAASGIPFSXXXXXWFRQAPGKQRDSVAXXXXXRFTI |
| | | SRDNAKNTVYLQMNSLKPEDTAVYRCYFXXXXXWGQGTQVTVSS |
| KERE sequence no. 2 | SEQ ID NO: 2 | QVKLEESGGGLVQAGGSLRLSCVGSGRTFSXXXXXWFRLAPGKEREFVAXXXXXRFTI |
| | | SRDTASNRGYLHMNNLTPEDTAVYYCAAXXXXXWGQGTQVTVSS |
| KERE sequence no. 3 | SEQ ID NO: 3 | AVQLVDSGGGLVQAGDSLKLSCALTGGAFTXXXXXWFRQTPGREREFVAXXXXXRFTI |
| | | SRDNAKNMVYLRMNSLIPEDAAVYSCAAXXXXXWGQGTLVTVSS |
| KERE sequence no. 4 | SEQ ID NO: 4 | QVQLVESGGGLVEAGGSLRLSCTASESPFRXXXXXWFRQTSGQEREFVAXXXXXRFTI |
| | | SRDDAKNTVWLHGSTLKPEDTAVYYCAAXXXXXWGQGTQVTVSS |
| KERE sequence no. 5 | SEQ ID NO: 5 | AVQLVESGGGLVQGGGSLRLACAASERIFDXXXXXWYRQGPGNERELVAXXXXXRFTI |
| | | SMDYTKQTVYLHMNSLRPEDTGLYYCKIXXXXXWGQGTQVTVSS |
| KERE sequence no. 6 | SEQ ID NO: 6 | DVKFVESGGGLVQAGGSLRLSCVASGFNFDXXXXXWFRQAPGKEREEVAXXXXXRFT |
| | | ISSEKDKNSVYLQMNSLKPEDTALYICAGXXXXXWGRGTQVTVSS |
| KERE sequence no. 7 | SEQ ID NO: 7 | QVRLAESGGGLVQSGGSLRLSCVASGSTYTXXXXXWYRQYPGKQRALVAXXXXXRFT |
| | | IARDSTKDTFCLQMNNLKPEDTAVYYCYAXXXXXWGQGTQVTVSS |
| KERE sequence no. 8 | SEQ ID NO: 8 | EVQLVESGGGLVQAGGSLRLSCAASGFTSDXXXXXWFRQAPGKPREGVSXXXXXRFT |
| | | ISTDNAKNTVHLLMNRVNAEDTALYYOAVXXXXXWGRGTRVTVSS |
| KERE sequence no. 9 | SEQ ID NO: 9 | QVQLVESGGGLVQPGGSLRLSCQASGDISTXXXXXWYRQVPGKLREFVAXXXXXRFTI |
| | | SGDNAKRAIYLQMNNLKPDDTAVYYCNRXXXXXWGQGTQVTVSP |
| KERE sequence no. 10 | SEQ ID NO: 10 | QVPVVESGGGLVQAGDSLRLFCAVPSFTSTXXXXXWFRQAPGKEREFVAXXXXXRFTI |
| | | SRNATKNTLTLRMDSLKPEDTAVYYCAAXXXXXWGQGTQVTVSS |
| KERE sequence no. 11 | SEQ ID NO: 11 | EVQLVESGGGLVQAGDSLRLFCTVSGGTASXXXXXWFRQAPGEKREFVAXXXXXRFTI |
| | | ARENAGNMVYLQMNNLKPDDTALYTCAAXXXXXWGRGTQVTVSS |
| KERE sequence no. 12 | SEQ ID NO: 12 | AVQLVESGGDSVQPGDSQTLSCAASGRTNSXXXXXWFRQAPGKERVFLAXXXXXRFT |
| | | ISRDSAKNMMYLQMNNLKPQDTAVYYGAAXXXXXWGOGTQVTVSS |
| KERE sequence no. 13 | SEQ ID NO: 13 | AVQLVESGGGLVQAGGSLRLSCVVSGLTSSXXXXXWFRQTPWQERDFVAXXXXXRFT |
| | | ISRDNYKDTVLLEMNFLKPEDTAIYYCAAXXXXXWGQGTQVTVSS |
| KERE sequence no. 14 | SEQ ID NO: 14 | AVQLVESGGGLVQAGASLRLSCATSTRTLDXXXXXWFRQAPGRDREFVAXXXXXRFT |
| | | VSRDSAENTVALQMNSLKPEDTAVYYCAAXXXXXWGQGTRVTVSS |
| KERE sequence no. 15 | SEQ ID NO: 15 | QVQLVESGGGLVQPGGSLRLSCTVSRLTAHXXXXXWFRQAPGKEREAVSXXXXXRFTI |
| | | SRDYAGNTAFLQMDSLKPEDTGVYYCATXXXXXWSQGTQVTVSS |
| KERE sequence no. 16 | SEQ ID NO: 16 | EVQLVESGGELVQAGGSLKLSCTASGRNFVXXXXXWFRRAPGKEREFVAXXXXXRFT |
| | | VSRDNGKNTAYLRMNSLKPEDTADYYCAVXXXXXLSSGTQVTVSS |
| GLEW sequence no. 1 | SEQ ID NO: 17 | AVQLVESGGGLVQPGGSLRLSCAASGFTFSXXXXXWVRQAPGKVLEWVSXXXXXRFT |
| | | ISRDNAKNTLYLQMNSLKPEDTAVYYCVKXXXXXGSQGTQVTVSS |
| GLEW sequence no. 2 | SEQ ID NO: 18 | EVQLVESGGGLVQPGGSLRLSCVCVSSGCTXXXXXWVRQAPGKAEEWVSXXXXXRF |
| | | KISRDNAKKTLYLQMNSLGPEDTAMYYCQRXXXXXRGQGTQVTVSS |
| GLEW sequence no. 3 | SEQ ID NO: 19 | EVQLVESGGGLALPGGSLTLSCVFSGSTFSXXXXXWVRHTPGKAEEWVSXXXXXRFTI |
| | | SRDNAKNTLYLEMNSLSPEDTAMYYCGRXXXXXRSKGIQVTVSS |
| P, R, S 103 sequence no. 1 | SEQ ID NO: 20 | AVQLVESGGGLVOAGGSLRLSCAASGRTFSXXXXXWFRQAPGKEREFVAXXXXXRFTI |
| | | SRDNAKNTVYLQMNSLKPEDTAVYYCAAXXXXXRGQGTQVTVSS |
| P, R, S 103 sequence no. 2 | SEQ ID NO: 21 | DVQLVESGGDLVQPGGSLRLSCAASGFSFDXXXXXWLRQTPGKSLEWVGXXXXXRFT |
| | | ISRDNAKNMLYLHLNNLKSEDTAVYYCRRXXXXXLGQGTQVTVSS |
| P, R, S 103 sequence no. 3 | SEQ ID NO: 22 | EVQLVESGGGLVQPGGSLRLSCVCVSSGCTXXXXXWVRQAPGKAEEWVSXXXXXRF |
| | | KISRDNAKKTLYLQMNSLGPEDTAMYYCQRXXXXXRGQGTQVTVSS |

[0591] In particular, a Nanobody of the invention of the KERE group can be an amino acid sequence with the (general) structure
[0592] FR1-CDR l -FR2-CDR2-FR3-CDR3-FR4
   in which:
[0593] i) the amino acid residue at position 45 according to the Kabat numbering is a charged amino acid (as defined herein) or a cysteine residue, and position 44 is preferably an E;
   and in which:
[0594] ii) ER1 is an amino acid sequence that has at least 80% amino acid identity with at least one of the following amino acid sequences:

TABLE A-10

Representative FW1 sequences for Nanobodies
of the KERE-group.

| | | |
|---|---|---|
| KERE FW1 sequence no. 1 | SEQ ID NO: 23 | QVQRVESGGGLVQAGGSLRLSCAASGRTSS |
| KERE FW1 sequence no. 2 | SEQ ID NO: 24 | QVQLVESGGGLVQTGDSLSLSCSASGRTFS |
| KERE FW1 sequence no. 3 | SEQ ID NO: 25 | QVKLEESGGGLVQAGDSLRLSCAATGRAFG |
| KERE FW1 sequence no. 4 | SEQ ID NO: 26 | AVQLVESGGGLVQPGESLGLSCVASGRDFV |
| KERE FW1 sequence no. 5 | SEQ ID NO: 27 | EVQLVESGGGLVQAGGSLRLSCEVLGRTAG |
| KERE FW1 sequence no. 6 | SEQ ID NO: 28 | QVQLVESGGGWVQPGGSLRLSCAASETILS |
| KERE FW1 sequence no. 7 | SEQ ID NO: 29 | QVQLVESGGGTVQPGGSLNLSCVASGNTFN |
| KERE FW1 sequence no. 8 | SEQ ID NO: 30 | EVQLVESGGGLAQPGGSLQLSCSAPGFTLD |
| KERE FW1 sequence no. 9 | SEQ ID NO: 31 | AQELEESGGGLVQAGGSLRLSCAASGRTFN |

and in which:
[0595] iii) FR2 is an amino acid sequence that has at least 80% amino acid identity with at least one of the following amino acid sequences:

TABLE A-11
Representative FW2 sequences for Nanobodies
of the KERE-group.

| | | |
|---|---|---|
| KERE FW2 sequence | SEQ ID NO: 41 | WFRQAPGKEREFVA |
| no. 1 | | |
| KERE FW2 sequence | SEQ ID NO: 42 | WFRQTPGREREFVA |
| no. 2 | | |
| KERE FW2 sequence | SEQ ID NO: 43 | WYRQAPGKQREMVA |
| no. 3 | | |
| KERE FW2 sequence | SEQ ID NO: 44 | WYRQGPGKQRELVA |
| no. 4 | | |
| KERE FW2 sequence | SEQ ID NO: 45 | WIRQAPGKEREGVS |
| no. 5 | | |
| KERE FW2 sequence | SEQ ID NO: 46 | WFREAPGKEREGIS |
| no. 6 | | |
| KERE FW2 sequence | SEQ ID NO: 47 | WYRQAPGKERDLVA |
| no. 7 | | |
| KERE FW2 sequence | SEQ ID NO: 48 | WFRQAPGKQREEVS |
| no. 8 | | |
| KERE FW2 sequence | SEQ ID NO: 49 | WFRQPPGKVREFVG |
| no. 9 | | |

and in which:
[0596] iv) FR3 is an amino acid sequence that has at least 80% amino acid identity with at least one of the following amino acid sequences:

TABLE A-12

Representative FW3 sequences for Nanobodies
of the KERE-group.

| | | |
|---|---|---|
| KERE FW3 sequence no. 1 | SEQ ID NO: 50 | RFTISRDNAKNTVYLQMNSLKPEDTAVYRCYF |
| KERE FW3 sequence no. 2 | SEQ ID NO: 51 | RFAISRDNNKNTGYLQMNSLEPEDTAVYYCAA |
| KERE FW3 sequence no. 3 | SEQ ID NO: 52 | RFTVARNNAKNTVNLEMNSLKPEDTAVYYCAA |
| KERE FW3 sequence no. 4 | SEQ ID NO: 53 | RFTISRDIAKNTVDLLMNNLEPEDTAVYYCAA |
| KERE FW3 sequence no. 5 | SEQ ID NO: 54 | RLTISRDNAVDTMYLQMNSLKPEDTAVYYCAA |
| KERE FW3 sequence no. 6 | SEQ ID NO: 55 | RFTISRDNAKNTVYLQMDNVKPEDTAIYYCAA |
| KERE FW3 sequence no. 7 | SEQ ID NO: 56 | RFTISKDSGKNTVYLQMTSLKPEDTAVYYCAT |
| KERE FW3 sequence no. 8 | SEQ ID NO: 57 | RFTISRDSAKNMMYLQMNNLKPQDTAVYYCAA |
| KERE FW3 sequence no. 9 | SEQ ID NO: 58 | RFTISRENDKSTVYLQLNSLKPEDTAVYYCAA |
| KERE FW3 sequence no. 10 | SEQ ID NO: 59 | RFTISRDYAGNTAYLQMNSLKPEDTGVYYCAT |

and in which:
[0597] v) FR4 is an amino acid sequence that has at least 80% amino acid identity with at least one of the following amino acid sequences:

TABLE A-13
Representative FW4 sequences for Nanobodies
of the KERE-group.

| | | |
|---|---|---|
| KERE FW4 sequence no. 1 | SEQ ID NO: 60 | WGQGTQVTVSS |
| KERE FW4 sequence no. 2 | SEQ ID NO: 61 | WGKGTLVTVSS |
| KERE FW4 sequence no. 3 | SEQ ID NO: 62 | RGQGTRVTVSS |
| KERE FW4 sequence no. 4 | SEQ ID NO: 63 | WGLGTQVTISS |

and in which:
[0598] vi) CDR1, CDR2 and CDR3 are as defined herein, and are preferably as defined according to one of the preferred aspects herein, and are more preferably as defined according to one of the more preferred aspects herein.

[0599] In the above Nanobodies, one or more of the further Hallmark residues are preferably as described herein (for example, when they are V_{HH} sequences or partially humanized Nanobodies).

[0600] Also, the above Nanobodies may for example be V_{HH} sequences or may be humanized Nanobodies. When the above Nanobody sequences are V_{HH} sequences, they may be suitably humanized, as further described herein. When the Nanobodies are partially humanized Nanobodies, they may optionally be further suitably humanized, again as described herein.

[0601] With regard to framework 1, it will be clear to the skilled person that, when an amino acid sequence as outlined above is generated by expression of a nucleotide sequence, the first four amino acid sequences (i.e. amino acid residues 1-4 according to the Kabat numbering) may often be determined by the primer(s) that have been used to generate said nucleic acid. Thus, for determining the degree of amino acid identity, the first four amino acid residues are preferably disregarded.

[0602] Also, with regard to framework 1, and although amino acid positions 27 to 30 are according to the Kabat numbering considered to be part of the framework regions (and not the CDR's), it has been found by analysis of a database of more than 1000 V_{HH} sequences that the positions 27 to 30 have a variability (expressed in terms of V_{HH} entropy and V_{HH} variability—see Tables A-5 to A-8) that is much greater than the variability on positions 1 to 26. Because of this, for determining the degree of amino acid identity, the amino acid residues at positions 27 to 30 are preferably also disregarded.

[0603] In view of this, a Nanobody of the KERE class may be an amino acid sequence that is comprised of four framework regions/sequences interrupted by three complementarity determining regions/sequences, in which:
[0604] i) the amino acid residue at position 45 according to the Kabat numbering is a charged amino acid (as defined herein) or a cysteine residue, and position 44 is preferably an E;
   and in which:
[0605] ii) FR1 is an amino acid sequence that, on positions 5 to 26 of the Kabat numbering, has at least 80% amino acid identity with at least one of the following amino acid sequences:

TABLE A-14

Representative FW1 sequences (amino acid residues
5 to 26) for Nanobodies of the KERE-group.

| | | |
|---|---|---|
| KERE FW1 sequence no. 10 | SEQ ID NO: 32 | VESGGGLVQPGGSLRLSCAASG |
| KERE FW1 sequence no. 11 | SEQ ID NO: 33 | VDSGGGLVQAGDSLKLSCALTG |
| KERE FW1 sequence no. 12 | SEQ ID NO: 34 | VDSGGGLVQAGDSLRLSCAASG |
| KERE FW1 sequence no. 13 | SEQ ID NO: 35 | VDSGGGLVEAGGSLRLSCQVSE |
| KERE FW1 sequence no. 14 | SEQ ID NO: 36 | QDSGGGSVQAGGSLKLSCAASG |
| KERE FW1 sequence no. 15 | SEQ ID NO: 37 | VQSGGRLVQAGDSLRLSCAASE |
| KERE FW1 sequence no. 16 | SEQ ID NO: 38 | VESGGTLVQSGDSLKLSCASST |
| KERE FW1 sequence no. 17 | SEQ ID NO: 39 | MESGGDSVQSGGSLTLSCVASG |
| KERE FW1 sequence no. 18 | SEQ ID NO: 40 | QASGGGLVQAGGSLRLSCSASV |

and in which:
[0606] iii) FR2, FR3 and FR4 are as mentioned herein for FR2, FR3 and FR4 of Nanobodies of the KERE-class;
   and in which:
[0607] iv) CDR1, CDR2 and CDR3 are as defined herein, and are preferably as defined according to one of the preferred aspects herein, and are more preferably as defined according to one of the more preferred aspects herein.

[0608] The above Nanobodies may for example be V_{HH} sequences or may be humanized Nanobodies. When the above Nanobody sequences are V_{HH} sequences, they may be suitably humanized, as further described herein. When the Nanobodies are partially humanized Nanobodies, they may optionally be further suitably humanized, again as described herein.

[0609] A Nanobody of the GLEW class may be an amino acid sequence that is comprised of four framework regions/sequences interrupted by three complementarity determining regions/sequences, in which
[0610] i) preferably, when the Nanobody of the GLEW-class is a non-humanized Nanobody, the amino acid residue in position 108 is Q;
[0611] ii) FR1 is an amino acid sequence that has at least 80% amino acid identity with at least one of the following amino acid sequences:

TABLE A-15

Representative FW1 sequences for Nanohodies
of the GLEW-group.

| | | |
|---|---|---|
| GLEW FW1 sequence no. 1 | SEQ ID NO: 64 | QVQLVESGGGLVQPGGSLRLSCAASGFTFS |
| GLEW FW1 sequence no. 2 | SEQ ID NO: 65 | EVHLVESGGGLVRPGGSLRLSCAAFGFIFK |
| GLEW FW1 sequence no. 3 | SEQ ID NO: 66 | QVKLEESGGGLAQPGGSLRLSCVASGFTFS |
| GLEW FW1 sequence no. 4 | SEQ ID NO: 67 | EVQLVESGGGLVQPGGSLRLSCVCVSSGCT |
| GLEW FW1 sequence no. 5 | SEQ ID NO: 68 | EVQLVESGGGLALPGGSLTLSCVFSGSTFS |

and in which:
[0612] iii) FR2 is an amino acid sequence that has at least 80% amino acid identity with at least one of the following amino acid sequences:

TABLE A-16
Representative FW2 sequences for Nanobodies
of the GLEW-group.

| | | |
|---|---|---|
| GLEW FW2 sequence | SEQ ID NO: 72 | WVRQAPGKVLEWVS |
| no. 1 | | |
| GLEW FW2 sequence | SEQ ID NO: 73 | WVRRPPGKGLEWVS |
| no. 2 | | |
| GLEW FW2 sequence | SEQ ID NO: 74 | WVRQAPGMGLEWVS |
| no. 3 | | |
| GLEW FW2 sequence | SEQ ID NO: 75 | WVRQAPGKEPEWVS |
| no. 4 | | |
| GLEW FW2 sequence | SEQ ID NO: 76 | WVRQAPGKDQEWVS |
| no. 5 | | |
| GLEW FW2 sequence | SEQ ID NO: 77 | WVRQAPGKAEEWVS |
| no. 6 | | |
| GLEW FW2 sequence | SEQ ID NO: 78 | WVRQAPGKGLEWVA |
| no. 7 | | |
| GLEW FW2 sequence | SEQ ID NO: 79 | WVRQAPGRATEWVS |
| no. 8 | | |

and in which:
[0613] iv) FR3 is an amino acid sequence that has at least 80% amino acid identity with at least one of the following amino acid sequences:

TABLE A-17

Representative FW3 sequences for Nanobodies
of the GLEW-group.

| | | |
|---|---|---|
| GLEW FW3 sequence no. 1 | SEQ ID NO: 80 | RFTISRDNAKNTLYLQMNSLKPEDTAVYYCVK |
| GLEW FW3 sequence no. 2 | SEQ ID NO: 81 | RFTISRDNARNTLYLQMDSLIPEDTALYYCAR |
| GLEW FW3 sequence no. 3 | SEQ ID NO: 82 | RFTSSRDNAKSTLYLQMNDLKPEDTALYYCAR |
| GLEW FW3 sequence no. 4 | SEQ ID NO: 83 | RFIISRDNAKNTLYLQMNSLGPEDTAMYYCQR |
| GLEW FW3 sequence no. 5 | SEQ ID NO: 84 | RFTASRDNAKNTLYLQMNSLKSEDTARYYCAR |
| GLEW FW3 sequence no. 6 | SEQ ID NO: 85 | RFTISRDNAKNTLYLQMDDLQSEDTAMYYCGR |

and in which:
[0614] v) FR4 is an amino acid sequence that has at least 80% amino acid identity with at least one of the following amino acid sequences:

TABLE A-18
Representative FW4 sequences for Nanobodies
of the GLEW-group.

| | | |
|---|---|---|
| GLEW FW4 sequence no. 1 | SEQ ID NO: 86 | GSQGTQVTVSS |
| GLEW FW4 sequence no. 2 | SEQ ID NO: 87 | LRGGTQVTVSS |
| GLEW FW4 sequence no. 3 | SEQ ID NO: 88 | RGQGTLVTVSS |
| GLEW FW4 sequence no. 4 | SEQ ID NO: 89 | RSRGIQVTVSS |
| GLEW FW4 sequence no. 5 | SEQ ID NO: 90 | WGKGTQVTVSS |
| GLEW FW4 sequence no. 6 | SEQ ID NO: 91 | WGQGTQVTVSS |

and in which:
[0615] vi) CDR1, CDR2 and CDR3 are as defined herein, and are preferably as defined according to one of the preferred aspects herein, and are more preferably as defined according to one of the more preferred aspects herein.

[0616] In the above Nanobodies, one or more of the further Hallmark residues are preferably as described herein (for example, when they are V_{HH} sequences or partially humanized Nanobodies).

[0617] With regard to framework 1, it will again be clear to the skilled person that, for determining the degree of amino acid identity, the amino acid residues on positions 1 to 4 and 27 to 30 are preferably disregarded.

[0618] In view of this, a Nanobody of the GLEW class may be an amino acid sequence that is comprised of four framework regions/sequences interrupted by three complementarity determining regions/sequences, in which:
[0619] i) preferably, when the Nanobody of the GLEW-class is a non-humanized Nanobody, the amino acid residue in position 108 is Q;
   and in which:
[0620] ii) FR1 is an amino acid sequence that, on positions 5 to 26 of the Rabat numbering, has at least 80% amino acid identity with at least one of the following amino acid sequences:

TABLE A-19

Representative FW1 sequences (amino acid
residues 5 to 26) for Nanobodies of the
KERE-group.

| | | |
|---|---|---|
| GLEW FW1 sequence no. 6 | SEQ ID NO: 69 | VESGGGLVQPGGSLRLSCAASG |
| GLEW FW1 sequence no. 7 | SEQ ID NO: 70 | EESGGGLAQPGGSLRLSCVASG |
| GLEW FW1 sequence no. 8 | SEQ ID NO: 71 | VESGGSLALPGGSLTLSCVFSG |

and in which:
[0621] iii) FR2, FR3 and FR4 are as mentioned herein for FR2, FR3 and FR4 of Nanobodies of the GLEW-class;
   and in which:
[0622] iv) CDR1, CDR2 and CDR3 are as defined herein, and are preferably as defined according to one of the preferred aspects herein, and are more preferably as defined according to one of the more preferred aspects herein.

[0623] The above Nanobodies may for example be V_{HH} sequences or may be humanized Nanobodies. When the above Nanobody sequences are V_{HH} sequences, they may be suitably humanized, as further described herein. When the Nanobodies are partially humanized Nanobodies, they may optionally be further suitably humanized, again as described herein. In the above Nanobodies, one or more of the further Hallmark residues are preferably as described herein (for example, when they are V_{HH} sequences or partially humanized Nanobodies).

[0624] A Nanobody of the P, R, S 103 class may be an amino acid sequence that is comprised of four framework regions/sequences interrupted by three complementarity determining regions/sequences, in which
[0625] i) the amino acid residue at position 103 according to the Kabat numbering is different from W;
   and in which:
[0626] ii) preferably the amino acid residue at position 103 according to the Kabat numbering is P, R or S, and more preferably R;
   and in which:
[0627] iii) FR1 is an amino acid sequence that has at least 80% amino acid identity with at least one of the following amino acid sequences:

TABLE A-20

Representative FW1 sequences for Nanobodies
of the P, R, S 103-group.

| | | |
|---|---|---|
| P, R, S 103 FW1 sequence no. 1 | SEQ ID NO: 92 | AVQLVESGGGLVQAGGSLRLSCAASGRTFS |
| P, R, S 103 FW1 sequence no. 2 | SEQ ID NO: 93 | QVQLQESGGGMVQPGGSLRLSCAASGFDFG |
| P, R, S 103 FW1 sequence no. 3 | SEQ ID NO: 94 | EVHLVESGGGLVRPGGSLRLSCAAFGFIFK |
| P, R, S 103 FW1 sequence no. 4 | SEQ ID NO: 95 | QVQLAESGGGLVQPGGSLKLSCAASRTIVS |
| P, R, S 103 FW1 sequence no. 5 | SEQ ID NO: 96 | QEHLVESGGGLVDIGGSLRLSCAASERIFS |
| P, R, S 103 FW1 sequence no. 6 | SEQ ID NO: 97 | QVKLEESGGGLAQPGGSLRLSCVASGFTFS |
| P, R, S 103 FW1 sequence no. 7 | SEQ ID NO: 98 | EVQLVESGGGLVQPGGSLRLSCVCVSSGCT |
| P, R, S 103 FW1 sequence no. 8 | SEQ ID NO: 99 | EVQLVESGGGLALPGGSLTLSCVFSGSTFS |

and in which
[0628] iv) FR2 is an amino acid sequence that has at least 80% amino acid identity with at least one of the following amino acid sequences:

TABLE A-21

Representative FW2 sequences for Nanobodies
of the P, R, S 103-group.

| | | |
|---|---|---|
| P, R, S 103 FW2 sequence no. 1 | SEQ ID NO: 102 | WFRQAPGKEREFVA |
| P, R, S 103 FW2 sequence no. 2 | SEQ ID NO: 103 | WVRQAPGKVLEWVS |
| P, R, S 103 FW2 sequence no. 3 | SEQ ID NO: 104 | WVRRPPGKGLEWVS |
| P, R, S 103 FW2 sequence no. 4 | SEQ ID NO: 105 | WIRQAPGKEREGVS |
| P, R, S 103 FW2 sequence no. 5 | SEQ ID NO: 106 | WVRQYPGKEPEWVS |
| P, R, S 103 FW2 sequence no. 6 | SEQ ID NO: 107 | WFRQPPGKEHEFVA |
| P, R, S 103 FW2 sequence no. 7 | SEQ ID NO: 108 | WYRQAPSKRTELVA |
| P, R, S 103 FW2 sequence no. 8 | SEQ ID NO: 109 | WLRQAPGQGLEWVS |
| P, R, S 103 FW2 sequence no. 9 | SEQ ID NO: 110 | WLRQTPGKGLEWVG |
| P, R, S 103 FW2 sequence no. 10 | SEQ ID NO: 111 | WVRQAPGKAEEFVS |

and in which:
[0629] v) FR3 is an amino acid sequence that has at least 80% amino acid identity with at least one of the following amino acid sequences:

TABLE A-22

Representative FW3 sequences for Nanobodies
of the P, R, S 103-group.

| | | |
|---|---|---|
| P, R, S 103 FW3 sequence no. 1 | SEQ ID NO: 112 | RFTISRDNAKNTVYLQMNSLKPEDTAVYYCAA |
| P, R, S 103 FW3 sequence no. 2 | SEQ ID NO: 113 | RFTISRDNARNTLYLQMDSLIPEDTALYYCAR |
| P, R, S 103 FW3 sequence no. 3 | SEQ ID NO: 114 | RFTISRDNAKNEMYLQMNNLKTEDTGVYWCGA |
| P, R, S 103 FW3 sequence no. 4 | SEQ ID NO: 115 | RFTISSDSNRNMIYLQMNNLKPEDTAVYYCAA |
| P, R, S 103 FW3 sequence no. 5 | SEQ ID NO: 116 | RFTISRDNAKNMLYLHLNNLKSEDTAVYYCRR |
| P, R, S 103 FW3 sequence no. 6 | SEQ ID NO: 117 | RFTISRDNAKKTVYLRLNSLNPEDTAVYSCNL |
| P, R, S 103 FW3 sequence no. 7 | SEQ ID NO: 118 | RFKISRDNAKKTLYLQMNSLGPEDTAMYYCQR |
| P, R, S 103 FW3 sequence no. 8 | SEQ ID NO: 119 | RFTVSRDNGKNTAYLRMNSLKPEDTADYYCAV |

and in which:
[0630] vi) FR4 is an amino acid sequence that has at least 80% amino acid identity with at least one of the following amino acid sequences:

A-23
Representative FW4 sequences for Nanobodies
of the P, R, S 103-group.

| | | |
|---|---|---|
| P, R, S 103 FW4 sequence | SEQ ID NO: 120 | RGQGTQVTVSS |
| no. 1 | | |
| P, R, S 103 FW4 sequence | SEQ ID NO: 121 | LRGGTQVTVSS |
| no. 2 | | |
| P, R, S 103 FW4 sequence | SEQ ID NO: 122 | GNKGTLVTVSS |
| no. 3 | | |
| P, R, S 103 FW4 sequence | SEQ ID NO: 123 | SSPGTQVTVSS |
| no. 4 | | |
| P, R, S 103 FW4 sequence | SEQ ID NO: 124 | SSQGTLVTVSS |
| no. 5 | | |
| P, R, S 103 FW4 sequence | SEQ ID NO: 125 | RSRGIQVTVSS |
| no. 6 | | |

and in which:
[0631] vii) CDR1, CDR2 and CDR3 are as defined herein, and are preferably as defined according to one of the preferred aspects herein, and are more preferably as defined according to one of the more preferred aspects herein.

[0632] In the above Nanobodies, one or more of the further Hallmark residues are preferably as described herein (for example, when they are V_{HH} sequences or partially humanized Nanobodies).

[0633] With regard to framework 1, it will again be clear to the skilled person that, for determining the degree of amino acid identity, the amino acid residues on positions 1 to 4 and 27 to 30 are preferably disregarded.

[0634] In view of this, a Nanobody of the P,R,S 103 class may be an amino acid sequence that is comprised of four framework regions/sequences interrupted by three complementarity determining regions/sequences, in which:
[0635] i) the amino acid residue at position 103 according to the Kabat numbering is different from W;
   and in which:
[0636] ii) preferably the amino acid residue at position 103 according to the Kabat numbering is P, R or S, and more preferably R;
   and in which:
[0637] iii) FR1 is an amino acid sequence that, on positions 5 to 26 of the Kabat numbering, has at least 80% amino acid identity with at least one of the following amino acid sequences:

TABLE A-24
Representative FW1 sequences (amino acid
residues 5 to 26) for Nanobodies of the
P, R, S 103-group.

| | | |
|---|---|---|
| P, R, S 103 | SEQ ID NO: 100 | VESGGGLVQAGGSLRLSCAASG |
| FW1 sequence | | |
| no. 9 | | |
| P, R, S 103 | SEQ ID NO: 101 | AESGGGLVQPGGSLKLSCAASR |
| FW1 sequence | | |
| no. 10 | | |

and in which:
[0638] iv) FR2, FR3 and FR4 are as mentioned herein for FR2, FR3 and FR4 of Nanobodies of the P,R,S 103 class;
   and in which:
[0639] v) CDR1, CDR2 and CDR3 are as defined herein, and are preferably as defined according to one of the preferred aspects herein, and are more preferably as defined according to one of the more preferred aspects herein.

[0640] The above Nanobodies may for example be V_{HH} sequences or may be humanized Nanobodies. When the above Nanobody sequences are V_{HH} sequences, they may be suitably humanized, as further described herein. When the Nanobodies are partially humanized Nanobodies, they may optionally be further suitably humanized, again as described herein.

[0641] In the above Nanobodies, one or more of the further Hallmark residues are preferably as described herein (for example, when they are V_{HH} sequences or partially humanized Nanobodies).

[0642] In another preferred, but non-limiting aspect, the invention relates to a Nanobody as described above, in which the CDR sequences have at least 70% amino acid identity, preferably at least 80% amino acid identity, more preferably at least 90% amino acid identity, such as 95% amino acid identity or more or even essentially 100% amino acid identity with the CDR sequences of at least one of the amino acid sequences of SEQ ID NO's: 441-485. This degree of amino acid identity can for example be determined by determining the degree of amino acid identity (in a manner described herein) between said Nanobody and one or more of the sequences of SEQ ID NO's: 441-485, in which the amino acid residues that form the framework regions are disregarded. Such Nanobodies can be as further described herein.

[0643] As already mentioned herein, another preferred but non-limiting aspect of the invention relates to a Nanobody with an amino acid sequence that is chosen from the group consisting of SEQ ID NO's: 441-485 or from the group consisting of from amino acid sequences that have more than 80%, preferably more than 90%, more preferably more than 95%, such as 99% or more sequence identity (as defined herein) with at least one of the amino acid sequences of SEQ ID NO's: 441-485.

[0644] Also, in the above Nanobodies:
[0645] i) any amino acid substitution (when it is not a humanizing substitution as defined herein) is preferably, and compared to the corresponding amino acid sequence of SEQ ID NO's: 441-485, a conservative amino acid substitution, (as defined herein);
   and/or:
[0646] ii) its amino acid sequence preferably contains either only amino acid substitutions, or otherwise preferably no more than 5, preferably no more than 3, and more preferably only 1 or 2 amino acid deletions or insertions, compared to the corresponding amino acid sequence of SEQ ID NO's: 441-485;
   and/or
[0647] iii) the CDR's may be CDR's that are derived by means of affinity maturation, for example starting from the CDR's of to the corresponding amino acid sequence of SEQ ID NO's: 441-485.

[0648] Preferably, the CDR sequences and FR sequences in the Nanobodies of the invention are such that the Nanobodies of the invention (and polypeptides of the invention comprising the same):
[0649] bind to VEGF with a dissociation constant (K_{D}) of 10⁻⁵ to 10⁻² moles/liter or less, and preferably 10⁻⁷ to 10⁻¹² moles/liter or less and more preferably 10⁻⁸ to 10¹² moles/liter (i.e. with an association constant (K_{A}) of 10⁵ to 10¹² liter/moles or more, and preferably 10⁷ to 10¹² liter/moles or more and more preferably 10⁸ to 10¹² liter/moles);
   and/or such that they:
[0650] bind to VEGF with a kₒₙ-rate of between 10² M⁻¹ s⁻¹ to about 10⁷ M⁻¹ s⁻¹ preferably between 10³ M⁻¹ s⁻¹ and 10⁷ M⁻¹ s⁻¹, more preferably between 10⁴ M⁻¹ s⁻¹, such as between 10⁵ M⁻¹ s⁴ and 10⁷M⁻¹ s⁻¹;
   and/or such that they:
[0651] bind to VEGF with a k_{off} rate between 1 s⁻¹ (t_{1/2}=0.69 s) and 10⁻⁶ s⁻¹ (providing a near irreversible complex with a t_{1/2} of multiple days), preferably between 10⁻² s⁻¹ and 10⁻⁶ s⁻¹, more preferably between 10⁻³ S⁻¹ and 10⁻⁶ s⁻¹, such as between 10⁻⁴ s⁻¹.

[0652] Preferably, CDR sequences and FR sequences present in the Nanobodies of the invention are such that the Nanobodies of the invention will bind to VEGF with an affinity less than 500 nM, preferably less than 200 nM, more preferably less than 10 nM, such as less than 500 pM.

[0653] According to one non-limiting aspect of the invention, a Nanobody may be as defined herein, but with the proviso that it has at least “one amino acid difference” (as defined herein) in at least one of the framework regions compared to the corresponding framework region of a naturally occurring human V_{H} domain, and in particular compared to the corresponding framework region of DP-47. More specifically, according to one non-limiting aspect of the invention, a Nanobody may he as defined herein, but with the proviso that it has at least “one amino acid difference” (as defined herein) at at least one of the Hallmark residues (including those at positions 108, 103 and/or 45) compared to the corresponding framework region of a naturally occurring human V_{H} domain, and in particular compared to the corresponding framework region of DP-47. Usually, a Nanobody will have at least one such amino acid difference with a naturally occurring V_{H} domain in at least one of FR2 and/or FR4, and in particular at at least one of the Hallmark residues in FR2 and/or FR4 (again, including those at positions 108, 103 and/or 45).

[0654] Also, a humanized Nanobody of the invention may be as defined herein, but with the proviso that it has at least “one amino acid difference” (as defined herein) in at least one of the framework regions compared to the corresponding framework region of a naturally occurring V_{HH} domain. More specifically, according to one non-limiting aspect of the invention, a humanized Nanobody may be as defined herein, but with the proviso that it has at least “one amino acid difference” (as defined herein) at at least one of the Hallmark residues (including those at positions 108, 103 and/or 45) compared to the corresponding framework region of a naturally occurring V_{HH} domain. Usually, a humanized Nanobody will have at least one such amino acid difference with a naturally occurring V_{HH} domain in at least one of FR2 and/or FR4, and in particular at at least one of the Hallmark residues in FR2 and/or FR4 (again, including those at positions 108, 103 and/or 45).

[0655] As will be clear from the disclosure herein, it is also within the scope of the invention to use natural or synthetic analogs, mutants, variants, alleles, homologs and orthologs (herein collectively referred to as “analogs”) of the Nanobodies of the invention as defined herein, and in particular analogs of the Nanobodies of SEQ ID NO's: 441-485. Thus, according to one aspect of the invention, the term “Nanobody of the invention” in its broadest sense also covers such analogs.

[0656] Generally, in such analogs, one or more amino acid residues may have been replaced, deleted and/or added, compared to the Nanobodies of the invention as defined herein. Such substitutions, insertions or deletions may be made in one or more of the framework regions and/or in one or more of the CDR's. When such substitutions, insertions or deletions are made in one or more of the framework regions, they may be made at one or more of the Hallmark residues and/or at one or more of the other positions in the framework residues, although substitutions, insertions or deletions at the Hallmark residues are generally less preferred (unless these are suitable humanizing substitutions as described herein).

[0657] By means of non-limiting examples, a substitution may for example be a conservative substitution (as described herein) and/or an amino acid residue may be replaced by another amino acid residue that naturally occurs at the same position in another V_{HH} domain (see Tables A-5 to A-8 for some non-limiting examples of such substitutions), although the invention is generally not limited thereto. Thus, any one or more substitutions, deletions or insertions, or any combination thereof, that either improve the properties of the Nanobody of the invention or that at least do not detract too much from the desired properties or from the balance or combination of desired properties of the Nanobody of the invention (i.e. to the extent that the Nanobody is no longer suited for its intended use) are included within the scope of the invention. A skilled person will generally be able to determine and select suitable substitutions, deletions or insertions, or suitable combinations of thereof, based on the disclosure herein and optionally after a limited degree of routine experimentation, which may for example involve introducing a limited number of possible substitutions and determining their influence on the properties of the Nanobodies thus obtained.

[0658] For example, and depending on the host organism used to express the Nanobody or polypeptide of the invention, such deletions and/or substitutions may be designed in such a way that one or more sites for post-translational modification (such as one or more glycosylation sites) are removed, as will be within the ability of the person skilled in the art. Alternatively, substitutions or insertions may be designed so as to introduce one or more sites for attachment of functional groups (as described herein), for example to allow site-specific pegylation (again as described herein).

[0659] As can be seen from the data on the V_{HH} entropy and V_{HH} variability given in Tables A-5 to A-8 above, some amino acid residues in the framework regions are more conserved than others. Generally, although the invention in its broadest sense is not limited thereto, any substitutions, deletions or insertions are preferably made at positions that are less conserved. Also, generally, amino acid substitutions are preferred over amino acid deletions or insertions.

[0660] The analogs are preferably such that they can bind to VEGF with an affinity (suitably measured and/or expressed as a K_{D}-value (actual or apparent), a K_{A}-value (actual or apparent), a kₒₙ-rate and/or a k_{off}-rate, or alternatively as an 10₅₀ value, as further described herein) that is as defined herein for the Nanobodies of the invention.

[0661] The analogs are preferably also such that they retain the favourable properties the Nanobodies, as described herein.

[0662] Also, according to one preferred aspect, the analogs have a degree of sequence identity of at least 70%, preferably at least 80%, more preferably at least 90%, such as at least 95% or 99% or more; and/or preferably have at most 20, preferably at most 10, even more preferably at most 5, such as 4, 3, 2 or only 1 amino acid difference (as defined herein), with one of the Nanobodies of SEQ 1D NOs: 441-485.

[0663] Also, the framework sequences and CDR's of the analogs are preferably such that they are in accordance with the preferred aspects defined herein. More generally, as described herein, the analogs will have (a) a Q at position 108; and/or (b) a charged amino acid or a cysteine residue at position 45 and preferably an. E at position 44, and more preferably E at position 44 and R at position 45; and/or (c) P, R or S at position 103.

[0664] One preferred class of analogs of the Nanobodies of the invention comprise Nanobodies that have been humanized (i.e. compared to the sequence of a naturally occurring Nanobody of the invention). As mentioned in the background art cited herein, such humanization generally involves replacing one or more amino acid residues in the sequence of a naturally occurring V_{HH} with the amino acid residues that occur at the same position in a human V_{H} domain, such as a human V_{H}3 domain. Examples of possible humanizing substitutions or combinations of humanizing substitutions will be clear to the skilled person, for example from the Tables herein, from the possible humanizing substitutions mentioned in the background art cited herein, and/or from a comparision between the sequence of a Nanobody and the sequence of a naturally occurring human V_{H} domain.

[0665] The humanizing substitutions should be chosen such that the resulting humanized Nanobodies still retain the favourable properties of Nanobodies as defined herein, and more preferably such that they are as described for analogs in the preceding paragraphs. A skilled person will generally be able to determine and select suitable humanizing substitutions or suitable combinations of humanizing substitutions, based on the disclosure herein and optionally after a limited degree of routine experimentation, which may for example involve introducing a limited number of possible humanizing substitutions and determining their influence on the properties of the Nanobodies thus obtained.

[0666] Generally, as a result of humanization, the Nanobodies of the invention may become more “human-like”, while still retaining the favorable properties of the Nanobodies of the invention as described herein. As a result, such humanized Nanobodies may have several advantages, such as a reduced immunogenicity, compared to the corresponding naturally occurring V_{HH} domains. Again, based on the disclosure herein and optionally after a limited degree of routine experimentation, the skilled person will be able to select humanizing substitutions or suitable combinations of humanizing substitutions which optimize or achieve a desired or suitable balance between the favourable properties provided by the humanizing substitutions on the one hand and the favourable properties of naturally occurring V_{HH} domains on the other hand.

[0667] The Nanobodies of the invention may be suitably humanized at any framework residue(s), such as at one or more Hallmark residues (as defined herein) or at one or more other framework residues (i.e. non-Hallmark residues) or any suitable combination thereof. One preferred humanizing substitution for Nanobodies of the “P,R,S-103 group” or the “KERE group” is Q108 into L1.08. Nanobodies of the “GLEW class” may also be humanized by a Q108 into L108 substitution, provided at least one of the other Hallmark residues contains a camelid (camelizing) substitution (as defined herein). For example, as mentioned above, one particularly preferred class of humanized Nanobodies has GLEW or a GLEW-like sequence at positions 44-47; P, R or S (and in particular R) at position 103, and an L at position 108.

[0668] The humanized and other analogs, and nucleic acid sequences encoding the same, can be provided in any manner known per se. For example, the analogs can be obtained by providing a nucleic acid that encodes a naturally occurring V_{HH} domain, changing the codons for the one or more amino acid residues that are to be substituted into the codons for the corresponding desired amino acid residues (e.g. by site-directed mutagenesis or by PCR using suitable mismatch primers), expressing the nucleic acid/nucleotide sequence thus obtained in a suitable host or expression system; and optionally isolating and/or purifying the analog thus obtained to provide said analog in essentially isolated form (e.g. as further described herein). This can generally be performed using methods and techniques known per se, which will be clear to the skilled person, for example from the handbooks and references cited herein, the background art cited herein and/or from the further description herein. Alternatively, a nucleic acid encoding the desired analog can be synthesized in a manner known per se (for example using an automated apparatus for synthesizing nucleic acid sequences with a predefined amino acid sequence) and can then be expressed as described herein. Yet another technique may involve combining one or more naturally occurring and/or synthetic nucleic acid sequences each encoding a part of the desired analog, and then expressing the combined nucleic acid sequence as described herein. Also, the analogs can be provided using chemical synthesis of the pertinent amino acid sequence using techniques for peptide synthesis known per se, such as those mentioned herein.

[0669] In this respect, it will be also be clear to the skilled person that the Nanobodies of the invention (including their analogs) can be designed and/or prepared starting from human V_{H} sequences (i.e. amino acid sequences or the corresponding nucleotide sequences), such as for example from human V_{H}3 sequences such as DP-47, DP-51 or DP-29, i.e. by introducing one or more camelizing substitutions (i.e. changing one or more amino acid residues in the amino acid sequence of said human V_{H} domain into the amino acid residues that occur at the corresponding position in a V_{HH} domain), so as to provide the sequence of a Nanobody of the invention and/or so as to confer the favourable properties of a Nanobody to the sequence thus obtained. Again, this can generally be performed using the various methods and techniques referred to in the previous paragraph, using an amino acid sequence and/or nucleotide sequence for a human V_{H} domain as a starting point.

[0670] Some preferred, but non-limiting camelizing substitutions can be derived from Tables A-5-A-8. It will also be clear that camelizing substitutions at one or more of the Hallmark residues will generally have a greater influence on the desired properties than substitutions at one or more of the other amino acid positions, although both and any suitable combination thereof are included within the scope of the invention. For example, it is possible to introduce one or more camelizing substitutions that already confer at least some the desired properties, and then to introduce further camelizing substitutions that either further improve said properties and/or confer additional favourable properties. Again, the skilled person will generally be able to determine and select suitable camelizing substitutions or suitable combinations of camelizing substitutions, based on the disclosure herein and optionally after a limited degree of routine experimentation, which may for example involve introducing a limited number of possible camelizing substitutions and determining whether the favourable properties of Nanobodies are obtained or improved (i.e. compared to the original V_{H} domain).

[0671] Generally, however, such camelizing substitutions are preferably such that the resulting an amino acid sequence at least contains (a) a Q at position 108; and/or (b) a charged amino acid or a cysteine residue at position 45 and preferably also an E at position 44, and more preferably E at position 44 and R at position 45; and/or (c) P, R or S at position 103; and optionally one or more further camelizing substitutions. More preferably, the camelizing substitutions are such that they result in a Nanobody of the invention and/or in an analog thereof (as defined herein), such as in a humanized analog and/or preferably in an analog that is as defined in the preceding paragraphs.

[0672] As will also be clear from the disclosure herein, it is also within the scope of the invention to use parts or fragments, or combinations of two or more parts or fragments, of the Nanobodies of the invention as defined herein, and in particular parts or fragments of the Nanobodies of SEQ ID NO's: 441-485. Thus, according to one aspect of the invention, the term “Nanobody of the invention” in its broadest sense also covers such parts or fragments.

[0673] Generally, such parts or fragments of the Nanobodies of the invention (including analogs thereof) have amino acid sequences in which, compared to the amino acid sequence of the corresponding full length Nanobody of the invention (or analog thereof), one or more of the amino acid residues at the N-terminal end, one or more amino acid residues at the C-terminal end, one or more contiguous internal amino acid residues, or any combination thereof, have been deleted and/or removed.

[0674] The parts or fragments are preferably such that they can bind to VEGF with an affinity (suitably measured and/or expressed as a K_{D}-value (actual or apparent), a K_{A}-value (actual or apparent), a kₒₙ-rate and/or a k_{off}-rate, or alternatively as an IC5₀ value, as further described herein) that is as defined herein for the Nanobodies of the invention.

[0675] Any part or fragment is preferably such that it comprises at least 10 contiguous amino acid residues, preferably at least 20 contiguous amino acid residues, more preferably at least 30 contiguous amino acid residues, such as at least 40 contiguous amino acid residues, of the amino acid sequence of the corresponding full length Nanobody of the invention.

[0676] Also, any part or fragment is such preferably that it comprises at least one of CDR1, CDR2 and/or CDR3 or at least part thereof (and in particular at least CDR3 or at least part thereof). More preferably, any part or fragment is such that it comprises at least one of the CDR's (and preferably at least CDR3 or part thereof) and at least one other CDR (i.e. CDR1 or CDR2) or at least part thereof, preferably connected by suitable framework sequence(s) or at least part thereof. More preferably, any part or fragment is such that it comprises at least one of the CDR's (and preferably at least CDR3 or part thereof) and at least part of the two remaining CDR's, again preferably connected by suitable framework sequence(s) or at least part thereof.

[0677] According to another particularly preferred, but non-limiting aspect, such a part or fragment comprises at least CDR3, such as FR3, CDR3 and FR4 of the corresponding full length Nanobody of the invention, i.e. as for example described in the International application WO 03/050531 (tasters et al.).

[0678] As already mentioned above, it is also possible to combine two or more of such parts or fragments (i.e. from the same or different Nanobodies of the invention), i.e. to provide an analog (as defined herein) and/or to provide further parts or fragments (as defined herein) of a Nanobody of the invention. It is for example also possible to combine one or more parts or fragments of a Nanobody of the invention with one or more parts or fragments of a human V_{H} domain.

[0679] According to one preferred aspect, the parts or fragments have a degree of sequence identity of at least 50%, preferably at least 60%, more preferably at least 70%, even more preferably at least 80%, such as at least 90%, 95% or 99% or more with one of the Nanobodies of SEQ ID NOs: 441-485.

[0680] The parts and fragments, and nucleic acid sequences encoding the same, can be provided and optionally combined in any manner known per se. For example, such parts or fragments can be obtained by inserting a stop codon in a nucleic acid that encodes a full-sized Nanobody of the invention, and then expressing the nucleic acid thus obtained in a manner known per se (e.g. as described herein). Alternatively, nucleic acids encoding such parts or fragments can be obtained by suitably restricting a nucleic acid that encodes a full-sized Nanobody of the invention or by synthesizing such a nucleic acid in a manner known per se. Parts or fragments may also be provided using techniques for peptide synthesis known per se.

[0681] The invention in its broadest sense also comprises derivatives of the Nanobodies of the invention. Such derivatives can generally be obtained by modification, and in particular by chemical and/or biological (e.g enzymatical) modification, of the Nanobodies of the invention and/or of one or more of the amino acid residues that form the Nanobodies of the invention.

[0682] Examples of such modifications, as well as examples of amino acid residues within the Nanobody sequence that can be modified in such a manner (i.e. either on the protein backbone but preferably on a side chain), methods and techniques that can be used to introduce such modifications and the potential uses and advantages of such modifications will be clear to the skilled person.

[0683] For example, such a modification may involve the introduction (e.g. by covalent linking or in an other suitable manner) of one or more functional groups, residues or moieties into or onto the Nanobody of the invention, and in particular of one or more functional groups, residues or moieties that confer one or more desired properties or functionalities to the Nanobody of the invention. Example of such functional groups will be clear to the skilled person.

[0684] For example, such modification may comprise the introduction (e.g. by covalent binding or in any other suitable manner) of one or more functional groups that increase the half-life, the solubility and/or the absorption of the Nanobody of the invention, that reduce the immunogenicity and/or the toxicity of the Nanobody of the invention, that eliminate or attenuate any undesirable side effects of the Nanobody of the invention, and/or that confer other advantageous properties to and/or reduce the undesired properties of the Nanobodies and/or polypeptides of the invention; or any combination of two or more of the foregoing. Examples of such functional groups and of techniques for introducing them will be clear to the skilled person, and can generally comprise all functional groups and techniques mentioned in the general background art cited hereinabove as well as the functional groups and techniques known per se for the modification of pharmaceutical proteins, and in particular for the modification of antibodies or antibody fragments (including ScFv's and single domain antibodies), for which reference is for example made to Remington's Pharmaceutical Sciences, 16th ed., Mack Publishing Co., Easton, Pa. (1980). Such functional groups may for example be linked directly (for example covalently) to a Nanobody of the invention, or optionally via a suitable linker or spacer, as will again be clear to the skilled person.

[0685] One of the most widely used techniques for increasing the half-life and/or reducing the immunogenicity of pharmaceutical proteins comprises attachment of a suitable pharmacologically acceptable polymer, such as poly(ethyleneglycol) (PEG) or derivatives thereof (such as methoxypoly(ethyleneglycol) or mPEG). Generally, any suitable form of pegylation can be used, such as the pegylation used in the art for antibodies and antibody fragments (including but not limited to (single) domain antibodies and ScFv's); reference is made to for example Chapman, Nat. Biotechnol., 54, 531-545 (2002); by Veronese and Harris, Adv. Drug Deliv. Rev. 54, 453-456 (2003), by Harris and Chess, Nat. Rev. Drug. Discov., 2, (2003) and in WO 04/060965. Various reagents for pegylation of proteins are also commercially available, for example from Nektar Therapeutics, USA.

[0686] Preferably, site-directed pegylation is used, in particular via a cysteine-residue (see for example Yang et al., Protein Engineering, 16, 10, 761-770 (2003). For example, for this purpose, PEG may be attached to a cysteine residue that naturally occurs in a Nanobody of the invention, a Nanobody of the invention may be modified so as to suitably introduce one or more cysteine residues for attachment of PEG, or an amino acid sequence comprising one or more cysteine residues for attachment of PEG may be fused to the N- and/or C-terminus of a Nanobody of the invention, all using techniques of protein engineering known per se to the skilled person.

[0687] Preferably, for the Nanobodies and proteins of the invention, a PEG is used with a molecular weight of more than 5000, such as more than 10,000 and less than 200,000, such as less than 100,000; for example in the range of 20,000-80,000.

[0688] Another, usually less preferred modification comprises N-linked or O-linked glycosylation, usually as part of co-translational and/or post-translational modification, depending on the host cell used for expressing the Nanobody or polypeptide of the invention.

[0689] Yet another modification may comprise the introduction of one or more detectable labels or other signal-generating groups or moieties, depending on the intended use of the labelled Nanobody. Suitable labels and techniques for attaching, using and detecting them will be clear to the skilled person, and for example include, but are not limited to, fluorescent labels (such as fluorescein, isothiocyanate, rhodamine, phycoerythrin, phycocyanin, allophycocyanin, o-phthaldehyde, and fluorescamine and fluorescent metals such as ¹⁵²Eu or others metals from the lanthanide series), phosphorescent labels, chemiluminescent labels or bioluminescent labels (such as luminal, isoluminol, theromatic acridinium ester, imidazole, acridinium salts, oxalate ester, dioxetane or GFP and its analogs), radio-isotopes (such as ³H, ¹²⁵I, ³²P, ³⁵S, ¹⁴C, ⁵¹Cr, ³⁶Cl, ⁵⁷Co, ⁵⁸Co, ⁵⁹Fe, and ⁷⁵Se), metals, metal chelates or metallic cations (for example metallic cations such as ^{99m}Tc, ¹²³I , ¹¹¹In, ¹³¹I, ⁹⁷Ru, ⁶⁷Cu, ⁶⁷Ga, and ⁶⁸Ga or other metals or metallic cations that are particularly suited for use in in vivo, in vitro or in situ diagnosis and imaging, such as (¹⁵⁷Gd, ⁵⁵Mn, ¹⁶²Dy, ⁵²Cr, and ⁵⁶Fe), as well as chromophores and enzymes (such as malate dehydrogenase, staphylococcal nuclease, delta-V-steroid isomerase, yeast alcohol dehydrogenase, alpha-glycerophosphate dehydrogenase, triose phosphate isomerase, biotinavidin peroxidase, horseradish peroxidase, alkaline phosphatase, asparaginase, glucose oxidase, beta-galactosidase, ribonuclease, urease, catalase, glucose-VI-phosphate dehydrogenase, glucoamylase and acetylcholine esterase). Other suitable labels will be clear to the skilled person, and for example include moieties that can be detected using NMR or ESR spectroscopy.

[0690] Such labelled Nanobodies and polypeptides of the invention may for example be used for in vitro, in vivo or in situ assays (including immunoassays known per se such as ELISA, RIA, EIA and other “sandwich assays”, etc.) as well as in vivo diagnostic and imaging purposes, depending on the choice of the specific label.

[0691] As will be clear to the skilled person, another modification may involve the introduction of a chelating group, for example to chelate one of the metals or metallic cations referred to above. Suitable chelating groups for example include, without limitation, diethylenetriaminepentaacetic acid (DTPA) or ethylenediaminetetraacetic acid (EDTA).

[0692] Yet another modification may comprise the introduction of a functional group that is one part of a specific binding pair, such as the biotin-(strept)avidin binding pair. Such a functional group may be used to link the Nanobody of the invention to another protein, polypeptide or chemical compound that is bound to the other half of the binding pair, i.e. through formation of the binding pair. For example, a Nanobody of the invention may be conjugated to biotin, and linked to another protein, polypeptide, compound or carrier conjugated to avidin or streptavidin. For example, such a conjugated Nanobody may be used as a reporter, for example in a diagnostic system where a detectable signal-producing agent is conjugated to avidin or streptavidin. Such binding pairs may for example also be used to bind the Nanobody of the invention to a carrier, including carriers suitable for pharmaceutical purposes. One non-limiting example are the liposomal formulations described by Cao and Suresh, Journal of Drug Targetting, 8, 4, 257 (2000). Such binding pairs may also be used to link a therapeutically active agent to the Nanobody of the invention.

[0693] For some applications, in particular for those applications in which it is intended to kill a cell that expresses the target against which the Nanobodies of the invention are directed (e.g. in the treatment of cancer), or to reduce or slow the growth and/or proliferation such a cell, the Nanobodies of the invention may also be linked to a toxin or to a toxic residue or moiety. Examples of toxic moieties, compounds or residues which can be linked to a Nanobody of the invention to provide—for example—a cytotoxic compound will be clear to the skilled person and can for example be found in the prior art cited above and/or in the further description herein. One example is the so-called ADEPT™ technology described in WO 03/055527.

[0694] Other potential chemical and enzymatical modifications will be clear to the skilled person. Such modifications may also be introduced for research purposes (e.g. to study function-activity relationships). Reference is for example made to Lundblad and Bradshaw, Biotechnol. Appl. Biochem., 26, 143-151 (1997).

[0695] Preferably, the derivatives are such that they bind to VEGF with an affinity (suitably measured and/or expressed as a K_{D}-value (actual or apparent), a K_{A}-value (actual or apparent), a kₒₙ-rate and/or a k_{off}-rate, or alternatively as an IC₅₀ value, as further described herein) that is as defined herein for the Nanobodies of the invention.

[0696] As mentioned above, the invention also relates to proteins or polypeptides that essentially consist of or comprise at least one Nanobody of the invention. By “essentially consist of” is meant that the amino acid sequence of the polypeptide of the invention either is exactly the same as the amino acid sequence of a Nanobody of the invention or corresponds to the amino acid sequence of a Nanobody of the invention which has a limited number of amino acid residues, such as 1-20 amino acid residues, for example 1-10 amino acid residues and preferably 1-6 amino acid residues, such as 1, 2, 3, 4, 5 or 6 amino acid residues, added at the amino terminal end, at the carboxy terminal end, or at both the amino terminal end and the carboxy terminal end of the amino acid sequence of the Nanobody.

[0697] Said amino acid residues may or may not change, alter or otherwise influence the (biological) properties of the Nanobody and may or may not add further functionality to the Nanobody. For example, such amino acid residues:
[0698] can comprise an N-terminal Met residue, for example as result of expression in a heterologous host cell or host organism.
[0699] may form a signal sequence or leader sequence that directs secretion of the Nanobody from a host cell upon synthesis. Suitable secretory leader peptides will be clear to the skilled person, and may be as further described herein. Usually, such a leader sequence will be linked to the N-terminus of the Nanobody, although the invention in its broadest sense is not limited thereto;
[0700] may form a sequence or signal that allows the Nanobody to be directed towards and/or to penetrate or enter into specific organs, tissues, cells, or parts or compartments of cells, and/or that allows the Nanobody to penetrate or cross a biological barrier such as a cell membrane, a cell layer such as a layer of epithelial cells, a tumor including solid tumors, or the blood-brain-barrier. Examples of such amino acid sequences will be clear to the skilled person. Some non-limiting examples are the small peptide vectors (”Pep-trans vectors“) described in WO 03/026700 and in Temsamani et al., Expert Opin. Biol. Ther., 1, 773 (2001); Temsamani and Vidal, Drug Discov. Today, 9, 1012 (004) and Rousselle, J. Pharmacol. Exp. Ther., 296, 124-131 (2001), and the membrane translocator sequence described by Zhao et al., Apoptosis, 8, 631-637 (2003). C-terminal and N-terminal amino acid sequences for intracellular targeting of antibody fragments are for example described by Cardinale et al., Methods, 34, 171 (2004). Other suitable techniques for intracellular targeting involve the expression and/or use of so-called “intrabodies” comprising a Nanobody of the invention, as mentioned below; may form a “tag”, for example an amino acid sequence or residue that allows or facilitates the purification of the Nanobody, for example using affinity techniques directed against said sequence or residue. Thereafter, said sequence or residue may be removed (e.g. by chemical or enzymatical cleavage) to provide the Nanobody sequence (for this purpose, the tag may optionally be linked to the Nanobody sequence via a cleavable linker sequence or contain a cleavable motif). Some preferred, but non-limiting examples of such residues are multiple histidine residues, glutatione residues and a myc-tag (see for example SEQ ID NO:31 of WO 06/12282).
[0701] may be one or more amino acid residues that have been functionalized and/or that can serve as a site for attachment of functional groups. Suitable amino acid residues and functional groups will be clear to the skilled person and include, but are not limited to, the amino acid residues and functional groups mentioned herein for the derivatives of the Nanobodies of the invention.

[0702] According to another aspect, a polypeptide of the invention comprises a Nanobody of the invention, which is fused at its amino terminal end, at its carboxy terminal end, or both at its amino terminal end and at its carboxy terminal end to at least one further amino acid sequence, i.e. so as to provide a fusion protein comprising said Nanobody of the invention and the one or more further amino acid sequences. Such a fusion will also be referred to herein as a “Nanobody fusion”.

[0703] The one or more further amino acid sequence may be any suitable and/or desired amino acid sequences. The further amino acid sequences may or may not change, alter or otherwise influence the (biological) properties of the Nanobody, and may or may not add further functionality to the Nanobody or the polypeptide of the invention. Preferably, the further amino acid sequence is such that it confers one or more desired properties or functionalities to the Nanobody or the polypeptide of the invention.

[0704] For example, the further amino acid sequence may also provide a second binding site, which binding site may be directed against any desired protein, polypeptide, antigen, antigenic determinant or epitope (including but not limited to the same protein, polypeptide, antigen, antigenic determinant or epitope against which the Nanobody of the invention is directed, or a different protein, polypeptide, antigen, antigenic determinant or epitope).

[0705] Example of such amino acid sequences will be clear to the skilled person, and may generally comprise all amino acid sequences that are used in peptide fusions based on conventional antibodies and fragments thereof (including but not limited to ScFv's and single domain antibodies). Reference is for example made to the review by Holliger and Hudson, Nature Biotechnology, 23, 9, 1126-1136 (2005).

[0706] For example, such an amino acid sequence may be an amino acid sequence that increases the half-life, the solubility, or the absorption, reduces the immunogenicity or the toxicity, eliminates or attenuates undesirable side effects, and/or confers other advantageous properties to and/or reduces the undesired properties of the polypeptides of the invention, compared to the Nanobody of the invention per se. Some non-limiting examples of such amino acid sequences are serum proteins, such as human serum albumin (see for example WO 00/27435) or haptenic molecules (for example haptens that are recognized by circulating antibodies, see for example WO 98/22141).

[0707] In particular, it has been described in the art that linking fragments of immunoglobulins (such as V_{H} domains) to serum albumin or to fragments thereof can be used to increase the half-life. Reference is for made to WO 00/27435 and WO 01/077137).

[0708] According to the invention, the Nanobody of the invention is preferably either directly linked to serum albumin (or to a suitable fragment thereof) or via a suitable linker, and in particular via a suitable peptide linked so that the polypeptide of the invention can be expressed as a genetic fusion (protein). According to one specific aspect, the Nanobody of the invention may be linked to a fragment of serum albumin that at least comprises the domain III of serum albumin or part thereof. Reference is for example made to the U.S. provisional application 60/788,256 of Ablynx N.V. entitled “Albumin derived amino acid sequence, use thereof for increasing the half-life of therapeutic proteins and of other therapeutic proteins and entities, and constructs comprising the same” filed on Mar. 31, 2006 (see also PCT/EP2007/002817).

[0709] Alternatively, the further amino acid sequence may provide a second binding site or binding unit that is directed against a serum protein (such as, for example, human serum albumin or another serum protein such as IgG), so as to provide increased half-life in serum. Such amino acid sequences for example include the Nanobodies described below, as well as the small peptides and binding proteins described in WO 91/01743, WO 01/45746 and WO 02/076489 and the dAb's described in WO 03/002609 and WO 04/003019. Reference is also made to Harmsen et al., Vaccine, 23 (41); 4926-42, 2005, as well as to EP 0 368 684, as well as to the following the U.S. provisional applications 60/843,349 (see also PCT/EP2007/059475), 60/850,774 (see also PCT/EP2007/060849), 60/850,775 (see also PCT/EP2007/060850) by Ablynx N.V. mentioned herein and U.S. provisional application of Ablynx N.V. entitled “Peptides capable of binding to serum proteins” filed on Dec. 5, 2006 (see also PCT/EP2007/063348).

[0710] Such amino acid sequences may in particular be directed against serum albumin (and more in particular human serum albumin) and/or against IgG (and more in particular human IgG). For example, such amino acid sequences may be amino acid sequences that are directed against (human) serum albumin and amino acid sequences that can bind to amino acid residues on (human) serum albumin that are not involved in binding of serum albumin to FcRn (see for example WO 06/0122787) and/or amino acid sequences that are capable of binding to amino acid residues on serum albumin that do not form part of domain III of serum albumin (see again for example WO 06/0122787); amino acid sequences that have or can provide an increased half-life (see for example the U.S. provisional application 60/843,349 by Ablynx N.V. entitled “Serum albumin binding proteins with long half-lives” filed on Sep. 8, 2006; see also PCT/EP2007/059475); amino acid sequences against human serum albumin that are cross-reactive with serum albumin from at least one species of mammal, and in particular with at least one species of primate (such as, without limitation, monkeys from the genus Macaca (such as, and in particular, cynomologus monkeys (Macaca fascicularis) and/or rhesus monkeys (Macaca mulatta)) and baboon (Papio ursinus), reference is again made to the U.S. provisional application 60/843,349 and PCT/EP2007/059475); amino acid sequences that can bind to serum albumin in a pH independent manner (see for example the U.S. provisional application 60/850,774 by Ablynx N.V. entitled “Amino acid sequences that bind to serum proteins in a manner that is essentially independent of the pH, compounds comprising the same, and uses thereof”, filed on Oct. 11, 2006; see also and PCT/EP2007/059475) and/or amino acid sequences that are conditional binders (see for example the U.S. provisional application 60/850,775 by Ablynx N.V. entitled “Amino acid sequences that bind to a desired molecule in a conditional manner”, filed on Oct. 11, 2006; see also PCT/EP2007/060850).

[0711] According to another aspect, the one or more further amino acid sequences may comprise one or more parts, fragments or domains of conventional 4-chain antibodies (and in particular human antibodies) and/or of heavy chain antibodies. For example, although usually less preferred, a Nanobody of the invention may be linked to a conventional (preferably human) V_{H} or V_{L} domain or to a natural or synthetic analog of a V_{H} or V_{L} domain, again optionally via a linker sequence (including but not limited to other (single) domain antibodies, such as the dAb's described by Ward et al.).

[0712] The at least one Nanobody may also be linked to one or more (preferably human) C_{H}1, C_{H}2 and/or C_{H}3 domains, optionally via a linker sequence. For instance, a Nanobody linked to a suitable C_{H}1 domain could for example be used—together with suitable light chains—to generate antibody fragments/structures analogous to conventional Fab fragments or F(ab′)₂ fragments, but in which one or (in case of an F(ab′)₂ fragment) one or both of the conventional V_{H} domains have been replaced by a Nanobody of the invention. Also, two Nanobodies could be linked to a C_{H}3 domain (optionally via a linker) to provide a construct with increased half-life in vivo.

[0713] According to one specific aspect of a polypeptide of the invention, one or more Nanobodies of the invention may be linked (optionally via a suitable linker or hinge region) to one or more constant domains (for example, 2 or 3 constant domains that can be used as part of/to form an Fc portion), to an Fe portion and/or to one or more antibody parts, fragments or domains that confer one or more effector functions to the polypeptide of the invention and/or may confer the ability to bind to one or more Fe receptors. For example, for this purpose, and without being limited thereto, the one or more further amino acid sequences may comprise one or more C_{H}2 and/or C_{H}3 domains of an antibody, such as from a heavy chain antibody (as described herein) and more preferably from a conventional human 4-chain antibody; and/or may form (part of) and Fc region, for example from IgG (e.g. from IgG1, IgG2, IgG3 or IgG4), from IgE or from another human Ig such as IgA, IgD or IgM. For example, WO 94/04678 describes heavy chain antibodies comprising a Camelid V_{HH} domain or a humanized derivative thereof (i.e. a Nanobody), in which the Camelidae C_{H}2 and/or C_{H}3 domain have been replaced by human C_{H}2 and C_{H}3 domains, so as to provide an immunoglobulin that consists of 2 heavy chains each comprising a Nanobody and human C_{H}2 and C_{H}3 domains (but no C_{H}1 domain), which immunoglobulin has the effector function provided by the C_{H}2 and C_{H}3 domains and which immunoglobulin can function without the presence of any light chains. Other amino acid sequences that can be suitably linked to the Nanobodies of the invention so as to provide an effector function will be clear to the skilled person, and may be chosen on the basis of the desired effector function(s). Reference is for example made to WO 04/058820, WO 99/42077, WO 02/056910 and WO 05/017148, as well as the review by Holliger and Hudson, supra and to the non-prepublished U.S. provisional application by Ablynx N.V. entitled “Constructs comprising single variable domains and an Fc portion derived from IgE” which has a filing date of Dec. 4, 2007. Coupling of a Nanobody of the invention to an Fe portion may also lead to an increased half-life, compared to the corresponding Nanobody of the invention. For some applications, the use of an Fc portion and/or of constant domains (i.e. C_{H}2 and/or C_{H}3 domains) that confer increased half-life without any biologically significant effector function may also be suitable or even preferred. Other suitable constructs comprising one or more Nanobodies and one or more constant domains with increased half-life in vivo will be clear to the skilled person, and may for example comprise two Nanobodies linked to a C_{H}3 domain, optionally via a linker sequence. Generally, any fusion protein or derivatives with increased half-life will preferably have a molecular weight of more than 50 kD, the cut-off value for renal absorption.

[0714] In another one specific, but non-limiting, aspect, in order to form a polypeptide of the invention, one or more amino acid sequences of the invention may be linked (optionally via a suitable linker or hinge region) to naturally occurring, synthetic or semisynthetic constant domains (or analogs, variants, mutants, parts or fragments thereof) that have a reduced (or essentially no) tendency to self-associate into dimers (i.e. compared to constant domains that naturally occur in conventional 4-chain antibodies). Such monomeric (i.e. not self-associating) Fc chain variants, or fragments thereof, will be clear to the skilled person. For example, Helm et al., J Biol Chem 1996 271 7494, describe monomeric FCE chain variants that can be used in the polypeptide chains of the invention.

[0715] Also, such monomeric Fc chain variants are preferably such that they are still capable of binding to the complement or the relevant Fe receptor(s) (depending on the Fc portion from which they are derived), and/or such that they still have some or all of the effector functions of the Fe portion from which they are derived (or at a reduced level still suitable for the intended use). Alternatively, in such a polypeptide chain of the invention, the monomeric Fc chain may be used to confer increased half-life upon the polypeptide chain, in which case the monomeric Fc chain may also have no or essentially no effector functions.

[0716] Bivalent/multivalent, bispecific/multispecific or biparatopic/multiparatopic polypeptides of the invention may also be linked to Fc portions, in order to provide polypeptide constructs of the type that is described in the non-prepublished U.S. provisional application entitled “immunoglobulin constructs” filed on Dec. 4, 2007.

[0717] The further amino acid sequences may also form a signal sequence or leader sequence that directs secretion of the Nanobody or the polypeptide of the invention from a host cell upon synthesis (for example to provide a pre-, pro- or prepro-form of the polypeptide of the invention, depending on the host cell used to express the polypeptide of the invention).

[0718] The further amino acid sequence may also form a sequence or signal that allows the Nanobody or polypeptide of the invention to be directed towards and/or to penetrate or enter into specific organs, tissues, cells, or parts or compartments of cells, and/or that allows the Nanobody or polypeptide of the invention to penetrate or cross a biological barrier such as a cell membrane, a cell layer such as a layer of epithelial cells, a tumor including solid tumors, or the blood-brain-barrier. Suitable examples of such amino acid sequences will be clear to the skilled person, and for example include, but are not limited to, the “Peptrans” vectors mentioned above, the sequences described by Cardinale et al. and the amino acid sequences and antibody fragments known per se that can be used to express or produce the Nanobodies and polypeptides of the invention as so-called “intrabodies”, for example as described in WO 94/02610, WO 95/22618, U.S. Pat. No. 7,004,940, WO 03/014960, WO 99/07414; WO 05/01690; EP 1 512 696; and in Cattaneo, A. & Biocca, S. (1997) Intracellular Antibodies: Development and Applications. Landes and Springer-Verlag; and in Kontermann, Methods 34, (2004), 163-170, and the further references described therein.

[0719] For some applications, in particular for those applications in which it is intended to kill a cell that expresses the target against which the Nanobodies of the invention are directed (e.g. in the treatment of cancer), or to reduce or slow the growth and/or proliferation of such a cell, the Nanobodies of the invention may also be linked to a (cyto)toxic protein or polypeptide. Examples of such toxic proteins and polypeptides which can be linked to a Nanobody of the invention to provide—for example—a cytotoxic polypeptide of the invention will be clear to the skilled person and can for example be found in the prior art cited above and/or in the further description herein. One example is the so-called ADEPT™ technology described in WO 03/055527.

[0720] According to one preferred, but non-limiting aspect, said one or more further amino acid sequences comprise at least one further Nanobody, so as to provide a polypeptide of the invention that comprises at least two, such as three, four, five or more Nanobodies, in which said Nanobodies may optionally be linked via one or more linker sequences (as defined herein). Polypeptides of the invention that comprise two or more Nanobodies, of which at least one is a Nanobody of the invention, will also be referred to herein as “multivalent” polypeptides of the invention, and the Nanobodies present in such polypeptides will also be referred to herein as being in a “multivalent format”. For example a “bivalent” polypeptide of the invention comprises two Nanobodies, optionally linked via a linker sequence, whereas a “trivalent” polypeptide of the invention comprises three Nanobodies, optionally linked via two linker sequences; etc.; in which at least one of the Nanobodies present in the polypeptide, and up to all of the Nanobodies present in the polypeptide, is/are a Nanobody of the invention.

[0721] In a multivalent polypeptide of the invention, the two or more Nanobodies may be the same or different, and may be directed against the same antigen or antigenic determinant (for example against the same part(s) or epitope(s) or against different parts or epitopes) or may alternatively be directed against different antigens or antigenic determinants; or any suitable combination thereof. For example, a bivalent polypeptide of the invention may comprise (a) two identical Nanobodies; (b) a first Nanobody directed against a first antigenic determinant of a protein or antigen and a second Nanobody directed against the same antigenic determinant of said protein or antigen which is different from the first Nanobody; (c) a first Nanobody directed against a first antigenic determinant of a protein or antigen and a second Nanobody directed against another antigenic determinant of said protein or antigen; or (d) a first Nanobody directed against a first protein or antigen and a second Nanobody directed against a second protein or antigen (i.e. different from said first antigen). Similarly, a trivalent polypeptide of the invention may, for example and without being limited thereto. comprise (a) three identical Nanobodies; (b) two identical Nanobody against a first antigenic determinant of an antigen and a third Nanobody directed against a different antigenic determinant of the same antigen; (c) two identical Nanobody against a first antigenic determinant of an antigen and a third Nanobody directed against a second antigen different from said first antigen; (d) a first Nanobody directed against a first antigenic determinant of a first antigen, a second Nanobody directed against a second antigenic determinant of said first antigen and a third Nanobody directed against a second antigen different from said first antigen; or (e) a first Nanobody directed against a first antigen, a second Nanobody directed against a second antigen different from said first antigen, and a third Nanobody directed against a third antigen different from said first and second antigen.

[0722] In a preferred aspect of the invention, a bivalent polypeptide of the invention is a polypeptide of the invention (as defined herein), comprising a first Nanobody directed against the binding site on VEGF for VEGFR-1, and a second Nanobody directed against the binding site on VEGF for VEGFR-2, in which said first and second Nanobody may optionally be linked via a linker sequence (as defined herein).

[0723] Polypeptides of the invention that contain at least two Nanobodies, in which at least one Nanobody is directed against a first antigen (i.e. VEGF) and at least one Nanobody is directed against a second antigen (i.e. an antigen different from VEGF), will also be referred to as “multispecific” polypeptides of the invention, and the Nanobodies present in such polypeptides will also be referred to herein as being in a “multispecific format”. Thus, for example, a “bispecific” polypeptide of the invention is a polypeptide that comprises at least one Nanobody directed against a first antigen (i.e. VEGF) and at least one further Nanobody directed against a second antigen (i.e. an antigen different from VEGF), whereas a “trispecific” polypeptide of the invention is a polypeptide that comprises at least one Nanobody directed against a first antigen (i.e. VEGF), at least one further Nanobody directed against a second antigen (i.e. an antigen different from VEGF) and at least one further Nanobody directed against a third antigen (i.e. different from both the first, and the second antigen); etc.

[0724] Accordingly, in another form, a bispecific polypeptide of the invention is a bivalent polypeptide of the invention (as defined herein), comprising a first Nanobody directed against VEGF, and a second Nanobody directed against a second antigen, in which said first and second Nanobody may optionally be linked via a linker sequence (as defined herein); whereas a trispecific polypeptide of the invention in its simplest form is a trivalent polypeptide of the invention (as defined herein), comprising a first Nanobody directed against VEGF, a second Nanobody directed against a second antigen and a third Nanobody directed against a third antigen, in which said first, second and third Nanobody may optionally be linked via one or more, and in particular one and more, in particular two, linker sequences.

[0725] In a preferred aspect of the invention, a bispecific polypeptide of the invention is a bivalent polypeptide of the invention (as defined herein), comprising a first Nanobody directed against VEGF, and a second Nanobody directed against a VEGF receptor, in which said first and second Nanobody may optionally be linked via a linker sequence (as defined herein). The bispecific polypeptide of the invention may be a bivalent polypeptide of the invention (as defined herein), comprising a first Nanobody directed against VEGF, and a second Nanobody directed against VEGFR-1, in which said first and second Nanobody may optionally be linked via a linker sequence (as defined herein); else, the bispecific polypeptide of the invention is a bivalent polypeptide of the invention (as defined herein), comprising a first Nanobody directed against VEGF, and a second Nanobody directed against VEGFR-2, in which said first and second Nanobody may optionally be linked via a linker sequence (as defined herein).

[0726] In another preferred aspect of the invention, a bispecific polypeptide of the invention is a bivalent polypeptide of the invention (as defined herein), comprising a first Nanobody directed against VEGF, and a second Nanobody directed against a tumor antigen, in which said first and second Nanobody may optionally be linked via a linker sequence (as defined herein).

[0727] Such targetting of the Nanobodies of the invention via bispecific polypeptides will result in a low systemic exposure of said Nanobodies and a presence of said Nanobodies in high concentrations at the tumor site, which may increase the efficacy of a tumor therapy while decreasing the side effects observed with the current therapeutics.

[0728] However, as will be clear from the description hereinabove, the invention is not limited thereto, in the sense that a multispecific polypeptide of the invention may comprise at least one Nanobody against VEGF, and any number of Nanobodies directed against one or more antigens different from VEGF.

[0729] Furthermore, although it is encompassed within the scope of the invention that the specific order or arrangement of the various Nanobodies in the polypeptides of the invention may have some influence on the properties of the final polypeptide of the invention (including but not limited to the affinity, specificity or avidity for VEGF, or against the one or more other antigens), said order or arrangement is usually not critical and may be suitably chosen by the skilled person, optionally after some limited routine experiments based on the disclosure herein. Thus, when reference is made to a specific multivalent or multispecific polypeptide of the invention, it should be noted that this encompasses any order or arrangements of the relevant Nanobodies, unless explicitly indicated otherwise.

[0730] Finally, it is also within the scope of the invention that the polypeptides of the invention contain two or more Nanobodies and one or more further amino acid sequences (as mentioned herein).

[0731] For multivalent and multispecific polypeptides containing one or more V_{HH} domains and their preparation, reference is also made to Conrath et al., J. Biol. Chem., Vol. 276, 10. 7346-7350, 2001; Muyldermans, Reviews in Molecular Biotechnology 74 (2001), 277-302; as well as to for example WO 96/34103 and WO 99/23221. Some other examples of some specific multispecific and/or multivalent polypeptide of the invention can be found in the applications by Ablynx N. V. referred to herein.

[0732] One preferred, but non-limiting example of a multispecific polypeptide of the invention comprises at least one Nanobody of the invention and at least one Nanobody that provides for an increased half-life. Such Nanobodies may for example be Nanobodies that are directed against a serum protein, and in particular a human serum protein, such as human serum albumin, thyroxine-binding protein, (human) transferrin, fibrinogen, an immunoglobulin such as IgG, IgE or IgM, or against one of the serum proteins listed in WO 04/003019. Of these, Nanobodies that can bind to serum albumin (and in particular human serum albumin) or to IgG (and in particular human IgG, see for example Nanobody VH-1 described in the review by Muyldermans, supra) are particularly preferred (although for example, for experiments in mice or primates, Nanobodies against or cross-reactive with mouse serum albumin (MSA) or serum albumin from said primate, respectively, can be used. However, for pharmaceutical use, Nanobodies against human serum albumin or human IgG will usually be preferred). Nanobodies that provide for increased half-life and that can be used in the polypeptides of the invention include the Nanobodies directed against serum albumin that are described in WO 04/041865, in WO 06/122787 and in the further patent applications by Ablynx N. V., such as those mentioned above.

[0733] For example, the some preferred Nanobodies that provide for increased half-life for use in the present invention include Nanobodies that can bind to amino acid residues on (human) serum albumin that are not involved in binding of serum albumin to FcRn (see for example WO 06/0122787); Nanobodies that are capable of binding to amino acid residues on serum albumin that do not form part of domain III of serum albumin (see for example WO 06/0122787); Nanobodies that have or can provide an increased half-life (see for example the US provisional application 60/843,349 by Ablynx N. V mentioned herein; see also PCT/EP2007/059475); Nanobodies against human serum albumin that are cross-reactive with serum albumin from at least one species of mammal, and in particular with at least one species of primate (such as, without limitation, monkeys from the genus Macaca (such as, and in particular, cynomologus monkeys (Macaca fascicularis) and/or rhesus monkeys (Macaca mulatta)) and baboon (Papio ursinus)) (see for example the U.S. provisional application 60/843,349 by Ablynx N. V; see also PCT/EP2007/059475); Nanobodies that can bind to serum albumin in a pH independent manner (see for example the U.S. provisional application 60/850,774 by Ablynx N. V. mentioned herein; see also PCT/EP2007/060849) and/or Nanobodies that are conditional binders (see for example the U.S. provisional application 60/850,775 by Ablynx N. V.; see also PCT/EP2007/060850).

[0734] Some particularly preferred Nanobodies that provide for increased half-life and that can be used in the polypeptides of the invention include the Nanobodies ALB-1 to ALB-10 disclosed in WO 06/122787 (see Tables II and III) of which ALB-8 (SEQ ID NO: 62 in WO 06/122787) is particularly preferred.

[0735] Some preferred, but non-limiting examples of polypeptides of the invention that comprise at least one Nanobody of the invention and at least one Nanobody that provides for increased half-life are given in SEQ ID NO's: 576-677.

[0736] According to a specific, but non-limiting aspect of the invention, the polypeptides of the invention contain, besides the one or more Nanobodies of the invention, at least one Nanobody against human serum albumin.

[0737] Generally, any polypeptides of the invention with increased half-life that contain one or more Nanobodies of the invention, and any derivatives of Nanobodies of the invention or of such polypeptides that have an increased half-life, preferably have a half-life that is at least 1.5 times, preferably at least 2 times, such as at least 5 times, for example at least 10 times or more than 20 times, greater than the half-life of the corresponding Nanobody of the invention per se. For example, such a derivative or polypeptides with increased half-life may have a half-life that is increased with more than 1 hours, preferably more than 2 hours, more preferably more than 6 hours, such as more than 12 hours, or even more than 24, 48 or 72 hours, compared to the corresponding Nanobody of the invention per se.

[0738] In a preferred, but non-limiting aspect of the invention, such derivatives or polypeptides may exhibit a serum half-life in human of at least about 12 hours, preferably at least 24 hours, more preferably at least 48 hours, even more preferably at least 72 hours or more. For example, such derivatives or polypeptides may have a half-life of at least 5 days (such as about 5 to 10 days), preferably at least 9 days (such as about 9 to 14 days), more preferably at least about 10 days (such as about 10 to 15 days), or at least about 11 days (such as about 11 to 16 days), more preferably at least about 12 days (such as about 12 to 18 days or more), or more than 14 days (such as about 14 to 19 days).

[0739] According to one aspect of the invention the polypeptides are capable of binding to one or more molecules which can increase the half-life of the polypeptide in vivo.

[0740] The polypeptides of the invention are stabilised in vivo and their half-life increased by binding to molecules which resist degradation and/or clearance or sequestration. Typically, such molecules are naturally occurring proteins which themselves have a long half-life in vivo.

[0741] Another preferred, but non-limiting example of a multispecific polypeptide of the invention comprises at least one Nanobody of the invention and at least one Nanobody that directs the polypeptide of the invention towards, and/or that allows the polypeptide of the invention to penetrate or to enter into specific organs, tissues, cells, or parts or compartments of cells, and/or that allows the Nanobody to penetrate or cross a biological barrier such as a cell membrane, a cell layer such as a layer of epithelial cells, a tumor including solid tumors, or the blood-brain-barrier. Examples of such Nanobodies include Nanobodies that are directed towards specific cell-surface proteins, markers or epitopes of the desired organ, tissue or cell (for example cell-surface markers associated with tumor cells), and the single-domain brain targeting antibody fragments described in WO 02/057445 and WO 06/040153, of which FC44 (SEQ ID NO: 189 of WO 06/040153) and FC5 (SEQ ID NO: 190 of WO 06/040154) are preferred examples.

[0742] In the polypeptides of the invention, the one or more Nanobodies and the one or more polypeptides may be directly linked to each other (as for example described in WO 99/23221) and/or may be linked to each other via one or more suitable spacers or linkers, or any combination thereof.

[0743] Suitable spacers or linkers for use in multivalent and multispecific polypeptides will be clear to the skilled person, and may generally be any linker or spacer used in the art to link amino acid sequences. Preferably, said linker or spacer is suitable for use in constructing proteins or polypeptides that are intended for pharmaceutical use.

[0744] Some particularly preferred spacers include the spacers and linkers that are used in the art to link antibody fragments or antibody domains. These include the linkers mentioned in the general background art cited above, as well as for example linkers that are used in the art to construct diabodies or ScFv fragments (in this respect, however, its should be noted that, whereas in diabodies and in ScFv fragments, the linker sequence used should have a length, a degree of flexibility and other properties that allow the pertinent V_{H} and V_{L} domains to come together to form the complete antigen-binding site, there is no particular limitation on the length or the flexibility of the linker used in the polypeptide of the invention, since each Nanobody by itself forms a complete antigen-binding site).

[0745] For example, a linker may be a suitable amino acid sequence, and in particular amino acid sequences of between 1 and 50, preferably between 1 and 30, such as between 1 and 10 amino acid residues. Some preferred examples of such amino acid sequences include gly-ser linkers, for example of the type (glyₓser_{y}), such as (for example (gly₄ser)₃ or (gly₃ser₂)₃, as described in WO 99/42077 and the GS30, GS 15, GS9 and GS7 linkers described in the applications by Ablynx mentioned herein (see for example WO 06/040153 and WO 06/122825), as well as hinge-like regions, such as the hinge regions of naturally occurring heavy chain antibodies or similar sequences (such as described in WO 94/04678).

[0746] Some other particularly preferred linkers are poly-alanine (such as AAA), as well as the linkers GS30 (SEQ ID NO: 85 in WO 06/122825) and GS9 (SEQ ID NO: 84 in WO 06/122825).

[0747] Other suitable linkers generally comprise organic compounds or polymers, in particular those suitable for use in proteins for pharmaceutical use. For instance, poly(ethyleneglycol) moieties have been used to link antibody domains, see for example WO 04/081026.

[0748] It is encompassed within the scope of the invention that the length, the degree of flexibility and/or other properties of the linker(s) used (although not critical, as it usually is for linkers used in ScFv fragments) may have some influence on the properties of the final polypeptide of the invention, including but not limited to the affinity, specificity or avidity for VEGF, or for one or more of the other antigens. Based on the disclosure herein, the skilled person will be able to determine the optimal linker(s) for use in a specific polypeptide of the invention, optionally after some limited routine experiments.

[0749] For example, in multivalent polypeptides of the invention that comprise Nanobodies directed against a multimeric antigen (such as a multimeric receptor or other protein), the length and flexibility of the linker are preferably such that it allows each Nanobody of the invention present in the polypeptide to bind to the antigenic determinant on each of the subunits of the multimer. Similarly, in a multispecific polypeptide of the invention that comprises Nanobodies directed against two or more different antigenic determinants on the same antigen (for example against different epitopes of an antigen and/or against different subunits of a multimeric receptor, channel or protein), the length and flexibility of the linker are preferably such that it allows each Nanobody to bind to its intended antigenic determinant. Again, based on the disclosure herein, the skilled person will be able to determine the optimal linker(s) for use in a specific polypeptide of the invention, optionally after some limited routine experiments.

[0750] It is also within the scope of the invention that the linker(s) used confer one or more other favourable properties or functionality to the polypeptides of the invention, and/or provide one or more sites for the formation of derivatives and/or for the attachment of functional groups (e.g. as described herein for the derivatives of the Nanobodies of the invention). For example, linkers containing one or more charged amino acid residues (see Table A-2 above) can provide improved hydrophilic properties, whereas linkers that form or contain small epitopes or tags can be used for the purposes of detection, identification and/or purification. Again, based on the disclosure herein, the skilled person will be able to determine the optimal linkers for use in a specific polypeptide of the invention, optionally after some limited routine experiments.

[0751] Finally, when two or more linkers are used in the polypeptides of the invention, these linkers may be the same or different. Again, based on the disclosure herein, the skilled person will be able to determine the optimal linkers for use in a specific polypeptide of the invention, optionally after some limited routine experiments.

[0752] Usually, for easy of expression and production, a polypeptide of the invention will be a linear polypeptide. However, the invention in its broadest sense is not limited thererto. For example, when a polypeptide of the invention comprises three of more Nanobodies, it is possible to link them by use of a linker with three or more “arms”, which each “arm” being linked to a Nanobody, so as to provide a “star-shaped” construct. It is also possible, although usually less preferred, to use circular constructs.

[0753] The invention also comprises derivatives of the polypeptides of the invention, which may be essentially analogous to the derivatives of the Nanobodies of the invention, i.e. as described herein.

[0754] The invention also comprises proteins or polypeptides that “essentially consist” of a polypeptide of the invention (in which the wording “essentially consist of has essentially the same meaning as indicated hereinabove).

[0755] According to one aspect of the invention, the polypeptide of the invention is in essentially isolated from, as defined herein.

[0756] The amino acid sequences, Nanobodies, polypeptides and nucleic acids of the invention can be prepared in a manner known per se, as will be clear to the skilled person from the further description herein. For example, the Nanobodies and polypetides of the invention can be prepared in any manner known per se for the preparation of antibodies and in particular for the preparation of antibody fragments (including but not limited to (single) domain antibodies and ScFv fragments). Some preferred, but non-limiting methods for preparing the amino acid sequences, Nanobodies, polypeptides and nucleic acids include the methods and techniques described herein.

[0757] As will be clear to the skilled person, one particularly useful method for preparing an amino acid sequence, Nanobody and/or a polypeptide of the invention generally comprises the steps of:
[0758] i) the expression, in a suitable host cell or host organism (also referred to herein as a “host of the invention”) or in another suitable expression system of a nucleic acid that encodes said amino acid sequence, Nanobody or polypeptide of the invention (also referred to herein as a “nucleic acid of the invention”), optionally followed by:
[0759] ii) isolating and/or purifying the amino acid sequence, Nanobody or polypeptide of the invention thus obtained.

[0760] In particular, such a method may comprise the steps of:
[0761] i) cultivating and/or maintaining a host of the invention under conditions that are such that said host of the invention expresses and/or produces at least one amino acid sequence, Nanobody and/or polypeptide of the invention; optionally followed by:
[0762] ii) isolating and/or purifying the amino acid sequence, Nanobody or polypeptide of the invention thus obtained.

[0763] A nucleic acid of the invention can be in the form of single or double stranded DNA or RNA, and is preferably in the form of double stranded DNA. For example, the nucleotide sequences of the invention may be genomic DNA, cDNA or synthetic DNA (such as DNA with a codon usage that has been specifically adapted for expression in the intended host cell or host organism).

[0764] According to one aspect of the invention, the nucleic acid of the invention is in essentially isolated from, as defined herein.

[0765] The nucleic acid of the invention may also be in the form of, be present in and/or be part of a vector, such as for example a plasmid, cosmid or YAC, which again may be in essentially isolated form.

[0766] The nucleic acids of the invention can be prepared or obtained in a manner known per se, based on the information on the amino acid sequences for the polypeptides of the invention given herein, and/or can be isolated from a suitable natural source. To provide analogs, nucleotide sequences encoding naturally occurring V_{HH} domains can for example be subjected to site-directed mutagenesis, so at to provide a nucleic acid of the invention encoding said analog. Also, as will be clear to the skilled person, to prepare a nucleic acid of the invention, also several nucleotide sequences, such as at least one nucleotide sequence encoding a Nanobody and for example nucleic acids encoding one or more linkers can be linked together in a suitable manner.

[0767] Techniques for generating the nucleic acids of the invention will be clear to the skilled person and may for instance include, but are not limited to, automated DNA synthesis; site-directed mutagenesis; combining two or more naturally occurring and/or synthetic sequences (or two or more parts thereof), introduction of mutations that lead to the expression of a truncated expression product; introduction of one or more restriction sites (e.g. to create cassettes and/or regions that may easily be digested and/or ligated using suitable restriction enzymes), and/or the introduction of mutations by means of a PCR reaction using one or more “mismatched” primers. These and other techniques will be clear to the skilled person, and reference is again made to the standard handbooks, such as Sambrook et al. and Ausubel et al., mentioned above, as well as the Examples below.

[0768] The nucleic acid of the invention may also be in the form of, be present in and/or be part of a genetic construct, as will be clear to the person skilled in the art. Such genetic constructs generally comprise at least one nucleic acid of the invention that is optionally linked to one or more elements of genetic constructs known per se, such as for example one or more suitable regulatory elements (such as a suitable promoter(s), enhancer(s), terminator(s), etc.) and the further elements of genetic constructs referred to herein. Such genetic constructs comprising at least one nucleic acid of the invention will also be referred to herein as “genetic constructs of the invention”.

[0769] The genetic constructs of the invention may be DNA or RNA, and are preferably double-stranded DNA. The genetic constructs of the invention may also be in a form suitable for transformation of the intended host cell or host organism, in a form suitable for integration into the genomic DNA of the intended host cell or in a form suitable for independent replication, maintenance and/or inheritance in the intended host organism. For instance, the genetic constructs of the invention may be in the form of a vector, such as for example a plasmid, cosmid, YAC, a viral vector or transposon. In particular, the vector may be an expression vector, i.e. a vector that can provide for expression in vitro and/or in vivo (e.g. in a suitable host cell, host organism and/or expression system).

[0770] In a preferred but non-limiting aspect, a genetic construct of the invention comprises
[0771] i) at least one nucleic acid of the invention; operably connected to
[0772] ii) one or more regulatory elements, such as a promoter and optionally a suitable terminator;
   and optionally also
[0773] iii) one or more further elements of genetic constructs known per se;
   in which the terms “regulatory element”, “promoter”, “terminator” and “operably connected” have their usual meaning in the art (as further described herein); and in which said “further elements” present in the genetic constructs may for example be 3′- or 5′-UTR sequences, leader sequences, selection markers, expression markers/reporter genes, and/or elements that may facilitate or increase (the efficiency of) transformation or integration. These and other suitable elements for such genetic constructs will be clear to the skilled person, and may for instance depend upon the type of construct used, the intended host cell or host organism; the manner in which the nucleotide sequences of the invention of interest are to be expressed (e.g. via constitutive, transient or inducible expression); and/or the transformation technique to be used. For example, regulatory requences, promoters and terminators known per se for the expression and production of antibodies and antibody fragments (including but not limited to (single) domain antibodies and ScFv fragments) may be used in an essentially analogous manner.

[0774] Preferably, in the genetic constructs of the invention, said at least one nucleic acid of the invention and said regulatory elements, and optionally said one or more further elements, are “operably linked” to each other, by which is generally meant that they are in a functional relationship with each other. For instance, a promoter is considered “operably linked” to a coding sequence if said promoter is able to initiate or otherwise control/regulate the transcription and/or the expression of a coding sequence (in which said coding sequence should be understood as being “under the control of” said promotor). Generally, when two nucleotide sequences are operably linked, they will be in the same orientation and usually also in the same reading frame. They will usually also be essentially contiguous, although this may also not be required.

[0775] Preferably, the regulatory and further elements of the genetic constructs of the invention are such that they are capable of providing their intended biological function in the intended host cell or host organism.

[0776] For instance, a promoter, enhancer or terminator should he “operable” in the intended host cell or host organism, by which is meant that (for example) said promoter should be capable of initiating or otherwise controlling/regulating the transcription and/or the expression of a nucleotide sequence—e.g. a coding sequence—to which it is operably linked (as defined herein).

[0777] Some particularly preferred promoters include, but are not limited to, promoters known per se for the expression in the host cells mentioned herein; and in particular promoters for the expression in the bacterial cells, such as those mentioned herein and/or those used in the Examples.

[0778] A selection marker should be such that it allows—i.e. under appropriate selection conditions—host cells and/or host organisms that have been (successfully) transformed with the nucleotide sequence of the invention to be distinguished from host cells/organisms that have not been (successfully) transformed. Some preferred, but non-limiting examples of such markers are genes that provide resistance against antibiotics (such as kanamycin or ampicillin), genes that provide for temperature resistance, or genes that allow the host cell or host organism to be maintained in the absence of certain factors, compounds and/or (food) components in the medium that are essential for survival of the non-transformed cells or organisms.

[0779] A leader sequence should be such that—in the intended host cell or host organism—it allows for the desired post-translational modifications and/or such that it directs the transcribed mRNA to a desired part or organelle of a cell. A leader sequence may also allow for secretion of the expression product from said cell. As such, the leader sequence may be any pro-, pre-, or prepro-sequence operable in the host cell or host organism. Leader sequences may not be required for expression in a bacterial cell. For example, leader sequences known per se for the expression and production of antibodies and antibody fragments (including but not limited to single domain antibodies and ScFv fragments) may be used in an essentially analogous manner.

[0780] An expression marker or reporter gene should be such that—in the host cell or host organism—it allows for detection of the expression of (a gene or nucleotide sequence present on) the genetic construct. An expression marker may optionally also allow for the localisation of the expressed product, e.g. in a specific part or organelle of a cell and/or in (a) specific cell(s), tissue(s), organ(s) or part(s) of a multicellular organism. Such reporter genes may also be expressed as a protein fusion with the amino acid sequence of the invention. Some preferred, but non-limiting examples include fluorescent proteins such as GFP.

[0781] Some preferred, but non-limiting examples of suitable promoters, terminator and further elements include those that can be used for the expression in the host cells mentioned herein; and in particular those that are suitable for expression in bacterial cells, such as those mentioned herein and/or those used in the Examples below. For some (further) non-limiting examples of the promoters, selection markers, leader sequences, expression markers and further elements that may be present/used in the genetic constructs of the invention—such as terminators, transcriptional and/or translational enhancers and/or integration factors—reference is made to the general handbooks such as Sambrook et al. and Ausubel et al. mentioned above, as well as to the examples that are given in WO 95/07463, WO 96/23810, WO 95/07463, WO 95/21191, WO 97/11094, WO 97/42320, WO 98/06737, WO 98/21355, U.S. Pat. No. 7,207,410, U.S. Pat. No. 5,693,492 and EP 1 085 089. Other examples will be clear to the skilled person. Reference is also made to the general background art cited above and the further references cited herein.

[0782] The genetic constructs of the invention may generally be provided by suitably linking the nucleotide sequence(s) of the invention to the one or more further elements described above, for example using the techniques described in the general handbooks such as Sambrook et al. and Ausubel et al., mentioned above.

[0783] Often, the genetic constructs of the invention will be obtained by inserting a nucleotide sequence of the invention in a suitable (expression) vector known per se. Some preferred, but non-limiting examples of suitable expression vectors are those used in the Examples below, as well as those mentioned herein.

[0784] The nucleic acids of the invention and/or the genetic constructs of the invention may be used to transform a host cell or host organism, i.e. for expression and/or production of the amino acid sequence, Nanobody or polypeptide of the invention. Suitable hosts or host cells will be clear to the skilled person, and may for example be any suitable fungal, prokaryotic or eukaryotic cell or cell line or any suitable fungal, prokaryotic or eukaryotic organism, for example:
[0785] a bacterial strain, including but not limited to gram-negative strains such as strains of Escherichia coli; of Proteus, for example of Proteus mirabilis; of Pseudomonas, for example of Pseudomonas fluorescens; and gram-positive strains such as strains of Bacillus, for example of Bacillus subtilis or of Bacillus brevis; of Streptomyces, for example of Streptomyces lividans; of Staphylococcus, for example of Staphylococcus carnosus; and of Lactococcus, for example of Lactococcus lactis;
[0786] a fungal cell, including but not limited to cells from species of Trichoderma, for example from Trichoderma reesei; of Neurospora, for example from Neurospora crassa; of Sordaria, for example from Sordaria macrospore; of Aspergillus, for example from Aspergillus niger or from Aspergillus sojae; or from other filamentous fungi;
[0787] a yeast cell, including but not limited to cells from species of Saccharomyces, for example of Saccharomyces cerevisiae; of Schizosaccharomyces, for example of Schizosaccharomyces pombe; of Pichia, for example of Pichia pastoris or of Pichia methanolica; of Hansenula, for example of Hansenula polymorpha; of Kluyveromyces, for example of Kluyveromyces lactis; of Arxula, for example of Arxula adeninivorans; of Yarrowia, for example of Yarrowia lipolytica;
[0788] an amphibian cell or cell line, such as Xenopus oocytes;
[0789] an insect-derived cell or cell line, such as cells/cell lines derived from lepidoptera, including but not limited to Spodoptera SF9 and Sf21 cells or cells/cell lines derived from Drosophila, such as Schneider and Kc cells;
[0790] a plant or plant cell, for example in tobacco plants; and/or
[0791] a mammalian cell or cell line, for example a cell or cell line derived from a human, a cell or a cell line from mammals including but not limited to CHO-cells, BHK-cells (for example BHK-21 cells) and human cells or cell lines such as HeLa, COS (for example COS-7) and PER.C6 cells;
   as well as all other hosts or host cells known per se for the expression and production of antibodies and antibody fragments (including but not limited to (single) domain antibodies and ScFv fragments), which will be clear to the skilled person. Reference is also made to the general background art cited hereinabove, as well as to for example WO 94/29457; WO 96/34103; WO 99/42077; Frenken et al., (1998), supra; Riechmann and Muyldermans, (1999), supra; van der Linden, (2000), supra; Thomassen et al., (2002), supra; Joosten et al., (2003), supra; Joosten et al., (2005), supra; and the further references cited herein.

[0792] The amino acid sequences, Nanobodies and polypeptides of the invention can also be introduced and expressed in one or more cells, tissues or organs of a multicellular organism, for example for prophylactic and/or therapeutic purposes (e.g. as a gene therapy). For this purpose, the nucleotide sequences of the invention may be introduced into the cells or tissues in any suitable way, for example as such (e.g. using liposomes) or after they have been inserted into a suitable gene therapy vector (for example derived from retroviruses such as adenovirus, or parvoviruses such as adeno-associated virus). As will also be clear to the skilled person, such gene therapy may be performed in vivo and/or in situ in the body of a patient by administering a nucleic acid of the invention or a suitable gene therapy vector encoding the same to the patient or to specific cells or a specific tissue or organ of the patient; or suitable cells (often taken from the body of the patient to be treated, such as explanted lymphocytes, bone marrow aspirates or tissue biopsies) may be treated in vitro with a nucleotide sequence of the invention and then be suitably (re-)introduced into the body of the patient. All this can be performed using gene therapy vectors, techniques and delivery systems which are well known to the skilled person, and for example described in Culver, K. W., “Gene Therapy”, 1994, p. xii, Mary Ann Liebert, Inc., Publishers, New York, N.Y); Giordano, Nature F Medicine 2 (1996), 534-539; Schaper, Circ. Res. 79 (1996), 911-919; Anderson, Science 256 (1992),808-813; Verma, Nature 389 (1994),239; Isner, Lancet 348 (1996),370-374; Muhlhauser, Circ. Res. 77 (1995),1077-1086; Onodera, Blood 91; (1998), 30-36; Verma, Gene Ther. 5 (1998),692-699; Nabel, Ann. N.Y. Acad. Sci.: 811 (1997), 289-292; Verzeletti, Hum. Gene Ther. 9 (1998), 2243-51; Wang, Nature Medicine 2 (1996),714-716; WO 94/29469; WO 97/00957, U.S. Pat. No. 5,580,859; U.S. Pat. No. 5,5895466; or Schaper, Current Opinion in Biotechnology 7 (1996), 635-640. For example, in situ expression of ScFv fragments (Afanasieva et al., Gene Ther., 10, 1850-1859 (2003)) and of diabodies (Blanco et al., J. Immunol, 171, 1070-1077 (2003)) has been described in the art.

[0793] For expression of the Nanobodies in a cell, they may also be expressed as so-called “intrabodies”, as for example described in WO 94/02610, WO 95/22618 and U.S. Pat. No. 7,004,940; WO 03/014960; in Cattaneo, A. & Biocca, S. (1997) Intracellular Antibodies: Development and Applications. Landes and Springer-Verlag; and in Kontermann, Methods 34, (2004), 163-170.

[0794] The amino acid sequences, Nanobodies and polypeptides of the invention can for example also be produced in the milk of transgenic mammals, for example in the milk of rabbits, cows, goats or sheep (see for example U.S. Pat. No. 6,741,957, U.S. Pat. No. 6,304,489 and U.S. Pat. No. 6,849,992 for general techniques for introducing transgenes into mammals), in plants or parts of plants including but not limited to their leaves, flowers, fruits, seed, roots or turbers (for example in tobacco, maize, soybean or alfalfa) or in for example pupae of the silkworm Bombix mori.

[0795] Furthermore, the amino acid sequences, Nanobodies and polypeptides of the invention can also be expressed and/or produced in cell-free expression systems, and suitable examples of such systems will be clear to the skilled person. Some preferred, but non-limiting examples include expression in the wheat germ system; in rabbit reticulocyte lysates; or in the E. coil Zubay system.

[0796] As mentioned above, one of the advantages of the use of Nanobodies is that the polypeptides based thereon can be prepared through expression in a suitable bacterial system, and suitable bacterial expression systems, vectors, host cells, regulatory elements, etc., will be clear to the skilled person, for example from the references cited above. It should however be noted that the invention in its broadest sense is not limited to expression in bacterial systems.

[0797] Preferably, in the invention, an (in vivo or in vitro) expression system, such as a bacterial expression system, is used that provides the polypeptides of the invention in a form that is suitable for pharmaceutical use, and such expression systems will again be clear to the skilled person. As also will be clear to the skilled person, polypeptides of the invention suitable for pharmaceutical use can be prepared using techniques for peptide synthesis.

[0798] For production on industrial scale, preferred heterologous hosts for the (industrial) production of Nanobodies or Nanobody-containing protein therapeutics include strains of E. coil, Pichia pastoris, S. cerevisiae that are suitable for large scale expression/production/fermentation, and in particular for large scale pharmaceutical (i.e. GMP grade) expression/production/fermentation. Suitable examples of such strains will be clear to the skilled person. Such strains and production/expression systems are also made available by companies such as Biovitrum (Uppsala, Sweden).

[0799] Alternatively, mammalian cell lines, in particular Chinese hamster ovary (CHO) cells, can be used for large scale expression/production/fermentation, and in particular for large scale pharmaceutical expression/production/fermentation. Again, such expression/production systems are also made available by some of the companies mentioned above.

[0800] The choice of the specific expression system would depend in part on the requirement for certain post-translational modifications, more specifically glycosylation. The production of a Nanobody-containing recombinant protein for which glycosylation is desired or required would necessitate the use of mammalian expression hosts that have the ability to glycosylate the expressed protein. In this respect, it will be clear to the skilled person that the glycosylation pattern obtained (i.e. the kind, number and position of residues attached) will depend on the cell or cell line that is used for the expression. Preferably, either a human cell or cell line is used (i.e. leading to a protein that essentially has a human glycosylation pattern) or another mammalian cell line is used that can provide a glycosylation pattern that is essentially and/or functionally the same as human glycosylation or at least mimics human glycosylation. Generally, prokaryotic hosts such as E. coli do not have the ability to glycosyl ate proteins, and the use of lower eukaryotes such as yeast usually leads to a glycosylation pattern that differs from human glycosylation. Nevertheless, it should be understood that all the foregoing host cells and expression systems can be used in the invention, depending on the desired amino acid sequence, Nanobody or polypeptide to be obtained.

[0801] Thus, according to one non-limiting aspect of the invention, the amino acid sequence, Nanobody or polypeptide of the invention is glycosylated. According to another non-limiting aspect of the invention, the amino acid sequence, Nanobody or polypeptide of the invention is non-glycosylated.

[0802] According to one preferred, but non-limiting aspect of the invention, the amino acid sequence, Nanobody or polypeptide of the invention is produced in a bacterial cell, in particular a bacterial cell suitable for large scale pharmaceutical production, such as cells of the strains mentioned above.

[0803] According to another preferred, but non-limiting aspect of the invention, the amino acid sequence, Nanobody or polypeptide of the invention is produced in a yeast cell, in particular a yeast cell suitable for large scale pharmaceutical production, such as cells of the species mentioned above.

[0804] According to yet another preferred, but non-limiting aspect of the invention, the amino acid sequence, Nanobody or polypeptide of the invention is produced in a mammalian cell, in particular in a human cell or in a cell of a human cell line, and more in particular in a human cell or in a cell of a human cell line that is suitable for large scale pharmaceutical production, such as the cell lines mentioned hereinabove.

[0805] When expression in a host cell is used to produce the amino acid sequences, Nanobodies and the polypeptides of the invention, the amino acid sequences, Nanobodies and polypeptides of the invention can be produced either intracellullarly (e.g. in the cytosol, in the periplasma or in inclusion bodies) and then isolated from the host cells and optionally further purified; or can be produced extracellularly (e.g. in the medium in which the host cells are cultured) and then isolated from the culture medium and optionally further purified. When eukaryotic host cells are used, extracellular production is usually preferred since this considerably facilitates the further isolation and downstream processing of the Nanobodies and proteins obtained. Bacterial cells such as the strains of E. coli mentioned above normally do not secrete proteins extracellularly, except for a few classes of proteins such as toxins and hemolysin, and secretory production in E. coli refers to the translocation of proteins across the inner membrane to the periplasmic space. Periplasmic production provides several advantages over cytosolic production. For example, the N-terminal amino acid sequence of the secreted product can be identical to the natural gene product after cleavage of the secretion signal sequence by a specific signal peptidase. Also, there appears to be much less protease activity in the periplasm than in the cytoplasm. In addition, protein purification is simpler due to fewer contaminating proteins in the periplasm. Another advantage is that correct disulfide bonds may form because the periplasm provides a more oxidative environment than the cytoplasm. Proteins overexpressed in E. coli are often found in insoluble aggregates, so-called inclusion bodies. These inclusion bodies may be located in the cytosol or in the periplasm; the recovery of biologically active proteins from these inclusion bodies requires a denaturation/refolding process. Many recombinant proteins, including therapeutic proteins, are recovered from inclusion bodies. Alternatively, as will be clear to the skilled person, recombinant strains of bacteria that have been genetically modified so as to secrete a desired protein, and in particular an amino acid sequence, Nanobody or a polypeptide of the invention, can be used.

[0806] Thus, according to one non-limiting aspect of the invention, the amino acid sequence, Nanobody or polypeptide of the invention is an amino acid sequence, Nanobody or polypeptide that has been produced intracellularly and that has been isolated from the host cell, and in particular from a bacterial cell or from an inclusion body in a bacterial cell. According to another non-limiting aspect of the invention, the amino acid sequence, Nanobody or polypeptide of the invention is an amino acid sequence, Nanobody or polypeptide that has been produced extracellularly, and that has been isolated from the medium in which the host cell is cultivated.

[0807] Some preferred, but non-limiting promoters for use with these host cells include,
[0808] for expression in E. coli: lac promoter (and derivatives thereof such as the lacUV5 promoter); arabinose promoter; left-(PL) and rightward (PR) promoter of phage lambda; promoter of the tip operon; hybrid lac/trp promoters (tac and trc); T7-promoter (more specifically that of T7-phage gene 10) and other T-phage promoters; promoter of the Tn10 tetracycline resistance gene; engineered variants of the above promoters that include one or more copies of an extraneous regulatory operator sequence;
[0809] for expression in S. cerevisiae: constitutive: ADH1 (alcohol dehydrogenase 1), ENO (enolase), CYC1 (cytochrome c iso-1), GAPDH (glyceraldehydes-3-phosphate dehydrogenase), PGK1 (phosphoglycerate kinase), PYK1 (pyruvate kinase); regulated: GAL1,10,7 (galactose metabolic enzymes), ADH2 (alcohol dehydrogenase 2), PHO5 (acid phosphatase), CUP1 (copper metallothionein); heterologous: CaMV (cauliflower mosaic virus 35S promoter);
[0810] for expression in Pichia pastoris: the AOX1 promoter (alcohol oxidase I);
[0811] for expression in mammalian cells: human cytomegalovirus (hCMV) immediate early enhancer/promoter; human cytomegalovirus (hCMV) immediate early promoter variant that contains two tetracycline operator sequences such that the promoter can be regulated by the Tet repressor; Herpes Simplex Virus thymidine kinase (TK) promoter; Rous Sarcoma Virus long terminal repeat (RSV LTR) enhancer/promoter; elongation factor 1α (hEF-1α) promoter from human, chimpanzee, mouse or rat; the SV40 early promoter; HIV-1 long terminal repeat promoter; β-actin promoter;

[0812] Some preferred, but non-limiting vectors for use with these host cells include:
[0813] vectors for expression in mammalian cells: pMAMneo (Clontech), pcDNA3 (Invitrogen), pMClneo (Stratagene), pSG5 (Stratagene), EBO-pSV2-neo (ATCC 37593), pBPV-1 (8-2) (ATCC 37110), pdBPV-MMTneo (342-12) (ATCC 37224), pRSVgpt (ATCC37199), pRSVneo (ATCC37198), pSV2-dhfr (ATCC 37146), pUCTag (ATCC 37460) and 1ZD35 (ATCC 37565), as well as viral-based expression systems, such as those based on adenovirus;
[0814] vectors for expression in bacterial cells: pET vectors (Novagen) and pQE vectors (Qiagen);
[0815] vectors for expression in yeast or other fungal cells: pYES2 (Invitrogen) and Pichia expression vectors (Invitrogen);
[0816] vectors for expression in insect cells: pBlueBacII (Invitrogen) and other baculovirus vectors
[0817] vectors for expression in plants or plant cells: for example vectors based on cauliflower mosaic virus or tobacco mosaic virus, suitable strains of Agrobacterium, or Ti-plasmid based vectors.

[0818] Some preferred, but non-limiting secretory sequences for use with these host cells include:
[0819] for use in bacterial cells such as E. coli: PeIB, Bla, OmpA, OmpC, OmpF, OmpT, StII, PhoA, PhoE, MalE, Lpp, LamB, and the like; TAT signal peptide, hemolysin C-terminal secretion signal;
[0820] for use in yeast: α-mating factor prepro-sequence, phosphatase (pho1), invertase (Suc), etc.;
[0821] for use in mammalian cells: indigenous signal in case the target protein is of eukaryotic origin; murine Ig κ-chain V-J2-C signal peptide; etc.

[0822] Suitable techniques for transforming a host or host cell of the invention will be clear to the skilled person and may depend on the intended host cell/host organism and the genetic construct to be used. Reference is again made to the handbooks and patent applications mentioned above.

[0823] After transformation, a step for detecting and selecting those host cells or host organisms that have been successfully transformed with the nucleotide sequence/genetic construct of the invention may be performed. This may for instance be a selection step based on a selectable marker present in the genetic construct of the invention or a step involving the detection of the amino acid sequence of the invention, e.g. using specific antibodies.

[0824] The transformed host cell (which may be in the form or a stable cell line) or host organisms (which may be in the form of a stable mutant line or strain) form further aspects of the present invention.

[0825] Preferably, these host cells or host organisms are such that they express, or are (at least) capable of expressing (e.g. under suitable conditions), an amino acid sequence, Nanobody or polypeptide of the invention (and in case of a host organism: in at least one cell, part, tissue or organ thereof). The invention also includes further generations, progeny and/or offspring of the host cell or host organism of the invention, that may for instance be obtained by cell division or by sexual or asexual reproduction.

[0826] To produce/obtain expression of the amino acid sequences of the invention, the transformed host cell or transformed host organism may generally be kept, maintained and/or cultured under conditions such that the (desired) amino acid sequence, Nanobody or polypeptide of the invention is expressed/produced. Suitable conditions will be clear to the skilled person and will usually depend upon the host cell/host organism used, as well as on the regulatory elements that control the expression of the (relevant) nucleotide sequence of the invention. Again, reference is made to the handbooks and patent applications mentioned above in the paragraphs on the genetic constructs of the invention.

[0827] Generally, suitable conditions may include the use of a suitable medium, the presence of a suitable source of food and/or suitable nutrients, the use of a suitable temperature, and optionally the presence of a suitable inducing factor or compound (e.g. when the nucleotide sequences of the invention are under the control of an inducible promoter); all of which may be selected by the skilled person. Again, under such conditions, the amino acid sequences of the invention may be expressed in a constitutive manner, in a transient manner, or only when suitably induced.

[0828] It will also be clear to the skilled person that the amino acid sequence, Nanobody or polypeptide of the invention may (first) be generated in an immature form (as mentioned above), which may then be subjected to post-translational modification, depending on the host cell/host organism used. Also, the amino acid sequence, Nanobody or polypeptide of the invention may be glycosylated, again depending on the host cell/host organism used.

[0829] The amino acid sequence, Nanobody or polypeptide of the invention may then be isolated from the host cell/host organism and/or from the medium in which said host cell or host organism was cultivated, using protein isolation and/or purification techniques known per se, such as (preparative) chromatography and/or electrophoresis techniques, differential precipitation techniques, affinity techniques (e.g. using a specific, cleavable amino acid sequence fused with the amino acid sequence, Nanobody or polypeptide of the invention) and/or preparative immunological techniques (i.e. using antibodies against the amino acid sequence to be isolated).

[0830] Generally, for pharmaceutical use, the polypeptides of the invention may be formulated as a pharmaceutical preparation or compositions comprising at least one polypeptide of the invention and at least one pharmaceutically acceptable carrier, diluent or excipient and/or adjuvant, and optionally one or more further pharmaceutically active polypeptides and/or compounds. By means of non-limiting examples, such a formulation may be in a form suitable for oral administration, for parenteral administration (such as by intravenous, intramuscular or subcutaneous injection or intravenous infusion), for topical administration, for administration by inhalation, by a skin patch, by an implant, by a suppository, etc. Such suitable administration forms—which may be solid, semi-solid or liquid, depending on the manner of administration—as well as methods and carriers for use in the preparation thereof, will be clear to the skilled person, and are further described herein.

[0831] Thus, in a further aspect, the invention relates to a pharmaceutical composition that contains at least one amino acid of the invention, at least one Nanobody of the invention or at least one polypeptide of the invention and at least one suitable carrier, diluent or excipient (i.e. suitable for pharmaceutical use), and optionally one or more further active substances.

[0832] Generally, the amino acid sequences, Nanobodies and polypeptides of the invention can be formulated and administered in any suitable manner known per se, for which reference is for example made to the general background art cited above (and in particular to WO 04/041862, WO 04/041863, WO 04/041865 and WO 04/041867) as well as to the standard handbooks, such as Remington's Pharmaceutical Sciences, 18^{th} Ed., Mack Publishing Company, USA (1990) or Remington, the Science and Practice of Pharmacy, 21th Edition, Lippincott Williams and Wilkins (2005).

[0833] For example, the amino acid sequences, Nanobodies and polypeptides of the invention may be formulated and administered in any manner known per se for conventional antibodies and antibody fragments (including ScFv's and diabodies) and other pharmaceutically active proteins. Such formulations and methods for preparing the same will be clear to the skilled person, and for example include preparations suitable for parenteral administration (for example intravenous, intraperitoneal, subcutaneous, intramuscular, intraluminal, intra-arterial or intrathecal administration) or for topical (i.e. transdermal or intradermal) administration.

[0834] Preparations for parenteral administration may for example be sterile solutions, suspensions, dispersions or emulsions that are suitable for infusion or injection. Suitable carriers or diluents for such preparations for example include, without limitation, sterile water and aqueous buffers and solutions such as physiological phosphate-buffered saline, Ringer's solutions, dextrose solution, and Hank's solution; water oils; glycerol; ethanol; glycols such as propylene glycol or as well as mineral oils, animal oils and vegetable oils, for example peanut oil, soybean oil, as well as suitable mixtures thereof. Usually, aqueous solutions or suspensions will be preferred.

[0835] The amino acid sequences, Nanobodies and polypeptides of the invention can also be administered using gene therapy methods of delivery. See, e.g., U.S. Pat. No. 5,399,346, which is incorporated by reference in its entirety. Using a gene therapy method of delivery, primary cells transfected with the gene encoding an amino acid sequence, Nanobody or polypeptide of the invention can additionally be transfected with tissue specific promoters to target specific organs, tissue, grafts, tumors, or cells and can additionally be transfected with signal and stabilization sequences for subcellularly localized expression.

[0836] Thus, the amino acid sequences, Nanobodies and polypeptides of the invention may be systemically administered, e.g., orally, in combination with a pharmaceutically acceptable vehicle such as an inert diluent or an assimilable edible carrier. They may be enclosed in hard or soft shell gelatin capsules, may be compressed into tablets, or may be incorporated directly with the food of the patient's diet. For oral therapeutic administration, the amino acid sequences, Nanobodies and polypeptides of the invention may be combined with one or more excipients and used in the form of ingestible tablets, buccal tablets, troches, capsules, elixirs, suspensions, syrups, wafers, and the like. Such compositions and preparations should contain at least 0.1% of the amino acid sequence, Nanobody or polypeptide of the invention. Their percentage in the compositions and preparations may, of course, be varied and may conveniently be between about 2 to about 60% of the weight of a given unit dosage form. The amount of the amino acid sequence, Nanobody or polypeptide of the invention in such therapeutically useful compositions is such that an effective dosage level will be obtained.

[0837] The tablets, troches, pills, capsules, and the like may also contain the following: binders such as gum tragacanth, acacia, corn starch or gelatin; excipients such as dicalcium phosphate; a disintegrating agent such as corn starch, potato starch, alginic acid and the like; a lubricant such as magnesium stearate; and a sweetening agent such as sucrose, fructose, lactose or aspartame or a flavoring agent such as peppermint, oil of wintergreen, or cherry flavoring may be added. When the unit dosage form is a capsule, it may contain, in addition to materials of the above type, a liquid carrier, such as a vegetable oil or a polyethylene glycol. Various other materials may be present as coatings or to otherwise modify the physical form of the solid unit dosage form. For instance, tablets, pills, or capsules may be coated with gelatin, wax, shellac or sugar and the like. A syrup or elixir may contain the amino acid sequences, Nanobodies and polypeptides of the invention, sucrose or fructose as a sweetening agent, methyl and propylparabens as preservatives, a dye and flavoring such as cherry or orange flavor. Of course, any material used in preparing any unit dosage form should be pharmaceutically acceptable and substantially non-toxic in the amounts employed. In addition, the amino acid sequences, Nanobodies and polypeptides of the invention may be incorporated into sustained-release preparations and devices.

[0838] Preparations and formulations for oral administration may also be provided with an enteric coating that will allow the constructs of the invention to resist the gastric environment and pass into the intestines. More generally, preparations and formulations for oral administration may be suitably formulated for delivery into any desired part of the gastrointestinal tract. In addition, suitable suppositories may be used for delivery into the gastrointestinal tract.

[0839] The amino acid sequences, Nanobodies and polypeptides of the invention may also be administered intravenously or intraperitoneally by infusion or injection. Solutions of the amino acid sequences, Nanobodies and polypeptides of the invention or their salts can be prepared in water, optionally mixed with a nontoxic surfactant. Dispersions can also be prepared in glycerol, liquid polyethylene glycols, triacetin, and mixtures thereof and in oils. Under ordinary conditions of storage and use, these preparations contain a preservative to prevent the growth of microorganisms.

[0840] The pharmaceutical dosage forms suitable for injection or infusion can include sterile aqueous solutions or dispersions or sterile powders comprising the active ingredient which are adapted for the extemporaneous preparation of sterile injectable or infusible solutions or dispersions, optionally encapsulated in liposomes. In all cases, the ultimate dosage form must be sterile, fluid and stable under the conditions of manufacture and storage. The liquid carrier or vehicle can be a solvent or liquid dispersion medium comprising, for example, water, ethanol, a polyol (for example, glycerol, propylene glycol, liquid polyethylene glycols, and the like), vegetable oils, nontoxic glyceryl esters, and suitable mixtures thereof. The proper fluidity can be maintained, for example, by the formation of liposomes, by the maintenance of the required particle size in the case of dispersions or by the use of surfactants. The prevention of the action of microorganisms can be brought about by various antibacterial and antifungal agents, for example, parabens, chlorobutanol, phenol, sorbic acid, thimerosal, and the like. In many cases, it will be preferable to include isotonic agents, for example, sugars, buffers or sodium chloride. Prolonged absorption of the injectable compositions can be brought about by the use in the compositions of agents delaying absorption, for example, aluminum monostearate and gelatin.

[0841] Sterile injectable solutions are prepared by incorporating the amino acid sequences, Nanobodies and polypeptides of the invention in the required amount in the appropriate solvent with various of the other ingredients enumerated above, as required, followed by filter sterilization. In the case of sterile powders for the preparation of sterile injectable solutions, the preferred methods of preparation are vacuum drying and the freeze drying techniques, which yield a powder of the active ingredient plus any additional desired ingredient present in the previously sterile-filtered solutions.

[0842] For topical administration, the amino acid sequences, Nanobodies and polypeptides of the invention may be applied in pure form, i.e., when they are liquids. However, it will generally be desirable to administer them to the skin as compositions or formulations, in combination with a dermatologically acceptable carrier, which may be a solid or a liquid.

[0843] Useful solid carriers include finely divided solids such as talc, clay, microcrystalline cellulose, silica, alumina and the like. Useful liquid carriers include water, hydroxyalkyls or glycols or water-alcohol/glycol blends, in which the amino acid sequences, Nanobodies and polypeptides of the invention can be dissolved or dispersed at effective levels, optionally with the aid of non-toxic surfactants. Adjuvants such as fragrances and additional antimicrobial agents can be added to optimize the properties for a given use. The resultant liquid compositions can be applied from absorbent pads, used to impregnate bandages and other dressings, or sprayed onto the affected area using pump-type or aerosol sprayers.

[0844] Thickeners such as synthetic polymers, fatty acids, fatty acid salts and esters, fatty alcohols, modified celluloses or modified mineral materials can also be employed with liquid carriers to form spreadable pastes, gels, ointments, soaps, and the like, for application directly to the skin of the user.

[0845] Examples of useful dermatological compositions which can be used to deliver the amino acid sequences, Nanobodies and polypeptides of the invention to the skin are known to the art; for example, see Jacquet et al. (U.S. Pat. No. 4,608,392), Geria (U.S. Pat. No. 4,992,478), Smith et al. (U.S. Pat. No. 4,559,157) and Wortzman (U.S. Pat. No. 4,820,508).

[0846] In a preferred aspect, the amino acid sequences, Nanobodies and polypeptides of the invention are delivered in a slow-release preparation. Slow-release preparations include (but are not limited to) semipermeable matrices of solid hydrophobic polymers containing the amino acid sequences, Nanobodies or polypeptides of the invention. These matrices are in the form of shaped articles, e.g. films, or microcapsules. Examples of slow-release matrices include polyesters, hydrogels such as poly (2-hydroxyethyl-methacrylate) as described by Langer et al. (J. Biomed. Mater. Res. 1981, 15: 167) and Langer (Chem. Tech., 1982, 12: 98-105), or poly(vinylalcohol), polylactides (U.S. Pat. No. 3,773,919), copolymers of L-glutamic acid and gamma ethyl-L-glutamate (Sidman et al. Biopolymers, 1983, 22: 547), non-degradable ethylene-vinyl acetate (Langer et al., supra), degradable lactic acid-glycolic acid copolymers such as the Lupron Depot™ (injectable micropheres composed of lactic acid-glycolic acid copolymer and leuprolide acetate), Dextran HydroxyEthylMethAcrylate polymers (Vlugt-Wensink et al., Biomacromolecules, 2006, 7: 2983) and poly-D-(−)-3-hydroxybutyric acid. While polymers such as ethylene-vinyl acetate and lactic acid-glycolic acid enable release of molecules for over 100 days, certain hydrogels release proteins for shorter time periods. When encapsulated amino acid sequences, Nanobodies or polypeptides of the invention remain in the body for a long time, they may denature or aggregate as a result of exposure to moisture at 37° C., resulting in a loss of biological activity and possible changes in immunogenicity.

[0847] Slow-release compositions of amino acid sequences, Nanobodies or polypeptides of the invention also include liposomally entrapped amino acid sequences, Nanobodies or polypeptides of the invention. Liposomes containing the amino acid sequences, Nanobodies or polypeptides of the invention are prepared by methods known in the art, such as described in Epstein et al. (Proc. Natl. Acad. Sci. USA 1985, 82: 3688), Hwang et al. (Proc. Natl. Acad. Sci. USA 1980, 77: 4030), U.S. Pat. No. 4,485,045 and U.S. Pat. No. 4,544,545. Ordinarily the liposomes are the small (about 200-800 Angstroms) unilamelar type in which the lipid content is greater than about 30 mol % cholesterol, the selected proportion being adjusted for the optimal therapy. Liposomes with enhanced circulation time are disclosed in U.S. Pat. No. 5,013,556.

[0848] Useful dosages of the amino acid sequences, Nanobodies and polypeptides of the invention can be determined by comparing their in vitro activity, and in vivo activity in animal models. Methods for the extrapolation of effective dosages in mice, and other animals, to humans are known to the art; for example, see U.S. Pat. No. 4,938,949.

[0849] Generally, the concentration of the amino acid sequences, Nanobodies and polypeptides of the invention in a liquid composition, such as a lotion, will be from about 0.1-25 wt-%, preferably from about 0.5-10 wt-%. The concentration in a semi-solid or solid composition such as a gel or a powder will be about 0.1-5 wt-%, preferably about 0.5-2.5 wt-%.

[0850] The amount of the amino acid sequences, Nanobodies and polypeptides of the invention required for use in treatment will vary not only with the particular amino acid sequence, Nanobody or polypeptide selected but also with the route of administration, the nature of the condition being treated and the age and condition of the patient and will be ultimately at the discretion of the attendant physician or clinician. Also the dosage of the amino acid sequences, Nanobodies and polypeptides of the invention varies depending on the target cell, tumor, tissue, graft, or organ.

[0851] The desired dose may conveniently be presented in a single dose or as divided doses administered at appropriate intervals, for example, as two, three, four or more sub-doses per day. The sub-dose itself may be further divided, e.g., into a number of discrete loosely spaced administrations; such as multiple inhalations from an insufflator or by application of a plurality of drops into the eye.

[0852] An administration regimen could include long-term, daily treatment. By “long-term” is meant at least two weeks and preferably, several weeks, months, or years of duration. Necessary modifications in this dosage range may be determined by one of ordinary skill in the art using only routine experimentation given the teachings herein. See Remington's Pharmaceutical Sciences (Martin, E. W., ed. 4), Mack Publishing Co., Easton, Pa. The dosage can also be adjusted by the individual physician in the event of any complication.

[0853] In another aspect, the invention relates to a method for the prevention and/or treatment of at least one condition or disease characterized by excessive and/or pathological angiogenesis or neovascularization, said method comprising administering, to a subject in need thereof, a pharmaceutically active amount of an amino acid sequence of the invention, of a Nanobody of the invention, of a polypeptide of the invention, and/or of a pharmaceutical composition comprising the same.

[0854] In the context of the present invention, the term “prevention and/or treatment” not only comprises preventing and/or treating the disease, but also generally comprises preventing the onset of the disease, slowing or reversing the progress of disease, preventing or slowing the onset of one or more symptoms associated with the disease, reducing and/or alleviating one or more symptoms associated with the disease, reducing the severity and/or the duration of the disease and/or of any symptoms associated therewith and/or preventing a further increase in the severity of the disease and/or of any symptoms associated therewith, preventing, reducing or reversing any physiological damage caused by the disease, and generally any pharmacological action that is beneficial to the patient being treated.

[0855] The subject to be treated may be any warm-blooded animal, but is in particular a mammal, and more in particular a human being. As will be clear to the skilled person, the subject to be treated will in particular be a person suffering from, or at risk of, the diseases and disorders mentioned herein.

[0856] The invention relates to a method for the prevention and/or treatment of at least one disease or disorder that is associated with VEGF, with its biological or pharmacological activity, and/or with the biological pathways or signalling in which VEGF is involved, said method comprising administering, to a subject in need thereof, a pharmaceutically active amount of an amino acid sequence of the invention, of a Nanobody of the invention, of a polypeptide of the invention, and/or of a pharmaceutical composition comprising the same. In particular, the invention relates to a method for the prevention and/or treatment of at least one disease or disorder that can be treated by modulating VEGF, its biological or pharmacological activity, and/or the biological pathways or signalling in which VEGF is involved, said method comprising administering, to a subject in need thereof, a pharmaceutically active amount of an amino acid sequence of the invention, of a Nanobody of the invention, of a polypeptide of the invention, and/or of a pharmaceutical composition comprising the same. In particular, said pharmaceutically effective amount may be an amount that is sufficient to modulate VEGF, its biological or pharmacological activity, and/or the biological pathways or signalling in which

[0857] VEGF is involved; and/or an amount that provides a level of the amino acid sequence of the invention, of a Nanobody of the invention, of a polypeptide of the invention in the circulation that is sufficient to modulate VEGF, its biological or pharmacological activity, and/or the biological pathways or signalling in which VEGF is involved.

[0858] The invention furthermore relates to a method for the prevention and/or treatment of at least one disease or disorder that can be prevented and/or treated by administering an amino acid sequence of the invention, a Nanobody of the invention or a polypeptide of the invention to a patient, said method comprising administering, to a subject in need thereof, a pharmaceutically active amount of an amino acid sequence of the invention, of a Nanobody of the invention, of a polypeptide of the invention, and/or of a pharmaceutical composition comprising the same.

[0859] More in particular, the invention relates to a method for the prevention and/or treatment of at least one disease or disorder chosen from the group consisting of the diseases and disorders listed herein, said method comprising administering, to a subject in need thereof, a pharmaceutically active amount of an amino acid sequence of the invention, of a Nanobody of the invention, of a polypeptide of the invention, and/or of a pharmaceutical composition comprising the same.

[0860] In another aspect, the invention relates to a method for immunotherapy, and in particular for passive immunotherapy, which method comprises administering, to a subject suffering from or at risk of the diseases and disorders mentioned herein, a pharmaceutically active amount of an amino acid sequence of the invention, of a Nanobody of the invention, of a polypeptide of the invention, and/or of a pharmaceutical composition comprising the same.

[0861] In the above methods, the amino acid sequences, Nanobodies and/or polypeptides of the invention and/or the compositions comprising the same can be administered in any suitable manner, depending on the specific pharmaceutical formulation or composition to be used. Thus, the amino acid sequences, Nanobodies and/or polypeptides of the invention and/or the compositions comprising the same can for example be administered orally, intraperitoneally (e.g. intravenously, subcutaneously, intramuscularly, or via any other route of administration that circumvents the gastrointestinal tract), intranasally, transdermally, topically, by means of a suppository, by inhalation, again depending on the specific pharmaceutical formulation or composition to be used. The clinician will be able to select a suitable route of administration and a suitable pharmaceutical formulation or composition to be used in such administration, depending on the disease or disorder to be prevented or treated and other factors well known to the clinician.

[0862] The amino acid sequences, Nanobodies and/or polypeptides of the invention and/or the compositions comprising the same are administered according to a regime of treatment that is suitable for preventing and/or treating the disease or disorder to be prevented or treated. The clinician will generally be able to determine a suitable treatment regimen, depending on factors such as the disease or disorder to be prevented or treated, the severity of the disease to be treated and/or the severity of the symptoms thereof, the specific amino acid sequence, Nanobody or polypeptide of the invention to be used, the specific route of administration and pharmaceutical formulation or composition to be used, the age, gender, weight, diet, general condition of the patient, and similar factors well known to the clinician.

[0863] Generally, the treatment regimen will comprise the administration of one or more amino acid sequences, Nanobodies and/or polypeptides of the invention, or of one or more compositions comprising the same, in one or more pharmaceutically effective amounts or doses. The specific amount(s) or doses to administered can be determined by the clinician, again based on the factors cited above.

[0864] Generally, for the prevention and/or treatment of the diseases and disorders mentioned herein and depending on the specific disease or disorder to be treated, the potency of the specific amino acid sequence, Nanobody and polypeptide of the invention to be used, the specific route of administration and the specific pharmaceutical formulation or composition used, the amino acid sequences, Nanobodies and polypeptides of the invention will generally be administered in an amount between 1 gram and 0.01 microgram per kg body weight per day, preferably between 0.1 gram and 0.1 microgram per kg body weight per day, such as about 1, 10, 100 or 1000 microgram per kg body weight per day, either continuously (e.g. by infusion), as a single daily dose or as multiple divided doses during the day. The clinician will generally be able to determine a suitable daily dose, depending on the factors mentioned herein. It will also be clear that in specific cases, the clinician may choose to deviate from these amounts, for example on the basis of the factors cited above and his expert judgment. Generally, some guidance on the amounts to be administered can be obtained from the amounts usually administered for comparable conventional antibodies or antibody fragments against the same target administered via essentially the same route, taking into account however differences in affinity/avidity, efficacy, biodistribution, half-life and similar factors well known to the skilled person.

[0865] Usually, in the above method, a single amino acid sequence, Nanobody or polypeptide of the invention will be used. It is however within the scope of the invention to use two or more amino acid sequences, Nanobodies and/or polypeptides of the invention in combination.

[0866] The Nanobodies, amino acid sequences and polypeptides of the invention may also be used in combination with one or more further pharmaceutically active compounds or principles, i.e. as a combined treatment regimen, which may or may not lead to a synergistic effect. Again, the clinician will be able to select such further compounds or principles, as well as a suitable combined treatment regimen, based on the factors cited above and his expert judgement.

[0867] In particular, the amino acid sequences, Nanobodies and polypeptides of the invention may be used in combination with other pharmaceutically active compounds or principles that are or can be used for the prevention and/or treatment of the diseases and disorders cited herein, as a result of which a synergistic effect may or may not be obtained. Examples of such compounds and principles, as well as routes, methods and pharmaceutical formulations or compositions for administering them will be clear to the clinician.

[0868] In an embodiment of the invention, the amino acid sequences, Nanobodies and polypeptides of the invention are used in combination with chemotherapeutic agents that are or can be used for the prevention and/or treatment of neoplastic diseases such as the different tumors, cancers and/or carcinoma mentioned herein. Any chemotherapeutic agent exhibiting anticancer activity can be used combined treatment with the amino acid sequences, Nanobodies or polypeptides of the invention. Preferably, the chemotherapeutic agent is selected from the group consisting of alkylating agents, antimetabolites, folic acid analogs, pyrimidine analogs, purine analogs and related inhibitors, vinca alkaloids, epipodopyyllotoxins, antibiotics, L-Asparaginase, topoisomerase inhibitor, interferons, platinum coordination complexes, anthracenedione substituted urea, methyl hydrazine derivatives, adrenocortical suppressant, adrenocorticosteroides, progestins, estrogens, antiestrogen, androgens, antiandrogen, and gonadotropin-releasing hormone analog. More preferably, the chemotherapeutic agent is selected from the group consisting of 5-fluorouracil (5-FU), leucovorin (LV), irenotecan, oxaliplatin, capecitabine, paclitaxel and doxetaxel. Two or more chemotherapeutic agents can be used in a cocktail to be administered in combination with administration of the amino acid sequence, Nanobody or polypeptide of the invention. One preferred combination chemotherapy is fluorouracil-based, comprising 5-FU and one or more other chemotherapeutic agent(s). Suitable dosing regimens of combination chemotherapies are known in the art and described in, for example, Saltz et al. (Proc. ASCO 1999, 18: 233a) and Douillard et al. (Lances 2000, 355: 1041).

[0869] When two or more substances or principles are to be used as part of a combined treatment regimen, they can be administered via the same route of administration or via different routes of administration, at essentially the same time or at different times (e.g. essentially simultaneously, consecutively, or according to an alternating regime). When the substances or principles are to be administered simultaneously via the same route of administration, they may be administered as different pharmaceutical formulations or compositions or part of a combined pharmaceutical formulation or composition, as will be clear to the skilled person.

[0870] Also, when two or more active substances or principles are to be used as part of a combined treatment regimen, each of the substances or principles may be administered in the same amount and according to the same regimen as used when the compound or principle is used on its own, and such combined use may or may not lead to a synergistic effect. However, when the combined use of the two or more active substances or principles leads to a synergistic effect, it may also be possible to reduce the amount of one, more or all of the substances or principles to be administered, while still achieving the desired therapeutic action. This may for example be useful for avoiding, limiting or reducing any unwanted side-effects that are associated with the use of one or more of the substances or principles when they are used in their usual amounts, while still obtaining the desired pharmaceutical or therapeutic effect.

[0871] The effectiveness of the treatment regimen used according to the invention may be determined and/or followed in any manner known per se for the disease or disorder involved, as will be clear to the clinician. The clinician will also be able, where appropriate and on a case-by-case basis, to change or modify a particular treatment regimen, so as to achieve the desired therapeutic effect, to avoid, limit or reduce unwanted side-effects, and/or to achieve an appropriate balance between achieving the desired therapeutic effect on the one hand and avoiding, limiting or reducing undesired side effects on the other hand.

[0872] Generally, the treatment regimen will be followed until the desired therapeutic effect is achieved and/or for as long as the desired therapeutic effect is to be maintained. Again, this can be determined by the clinician.

[0873] In another aspect, the invention relates to the use of an amino acid sequence, Nanobody or polypeptide of the invention in the preparation of a pharmaceutical composition for prevention and/or treatment of at least one condition or diseases characterized by excessive and/or pathological angiogenesis or neovascularization; and/or for use in one or more of the methods of treatment mentioned herein.

[0874] The subject to be treated may be any warm-blooded animal, but is in particular a mammal, and more in particular a human being. As will be clear to the skilled person, the subject to be treated will in particular be a person suffering from, or at risk of, the diseases and disorders mentioned herein.

[0875] The invention also relates to the use of an amino acid sequence, Nanobody or polypeptide of the invention in the preparation of a pharmaceutical composition for the prevention and/or treatment of at least one disease or disorder that can be prevented and/or treated by administering an amino acid sequence, Nanobody or polypeptide of the invention to a patient.

[0876] More in particular, the invention relates to the use of an amino acid sequence, Nanobody or polypeptide of the invention in the preparation of a pharmaceutical composition for the prevention and/or treatment of a condition or disease characterized by excessive and/or pathological angiogenesis or neovascularization, and in particular for the prevention and treatment of one or more of the diseases and disorders listed herein.

[0877] Again, in such a pharmaceutical composition, the one or more amino acid sequences, Nanobodies or polypeptides of the invention may also be suitably combined with one or more other active principles, such as those mentioned herein.

[0878] Finally, although the use of the Nanobodies of the invention (as defined herein) and of the polypeptides of the invention is much preferred, it will be clear that on the basis of the description herein, the skilled person will also be able to design and/or generate, in an analogous manner, other amino acid sequences and in particular (single) domain antibodies against VEGF, as well as polypeptides comprising such (single) domain antibodies.

[0879] For example, it will also be clear to the skilled person that it may be possible to “graft” one or more of the CDR's mentioned above for the Nanobodies of the invention onto such (single) domain antibodies or other protein scaffolds, including but not limited to human scaffolds or non-immunoglobulin scaffolds. Suitable scaffolds and techniques for such CDR grafting will be clear to the skilled person and are well known in the art, see for example U.S. Pat. No. 7,180,370, WO 01/27160, EP 0 605 522, EP 0 460 167, U.S. Pat. No. 7,054,297, Nicaise et al., Protein Science (2004), 13:1882-1891; Ewert et al., Methods, 2004 October; 34(2):184-199; Kettleborough et al., Protein Eng. 1991 October 4(7): 773-783; O'Brien and Jones, Methods Mol. Biol. 2003: 207: 81-100; Skerra, 7. Mol. Recognit. 2000: 13: 167-187, and Saerens et al., J. Mol. Biol. 2005 Sep. 23; 352(3):597-607, and the further references cited therein. For example, techniques known per se for grafting mouse or rat CDR's onto human frameworks and scaffolds can be used in an analogous manner to provide chimeric proteins comprising one or more of the CDR's of the Nanobodies of the invention and one or more human framework regions or sequences.

[0880] It should also be noted that, when the Nanobodies of the inventions contain one or more other CDR sequences than the preferred CDR sequences mentioned above, these CDR sequences can be obtained in any manner known per se, for example from Nanobodies (preferred), V_{H} domains from conventional antibodies (and in particular from human antibodies), heavy chain antibodies, conventional 4-chain antibodies (such as conventional human 4-chain antibodies) or other immunoglobulin sequences directed against VEGF. Such immunoglobulin sequences directed against VEGF can be generated in any manner known per se, as will be clear to the skilled person, i.e. by immunization with VEGF or by screening a suitable library of immunoglobulin sequences with VEGF, or any suitable combination thereof. Optionally, this may be followed by techniques such as random or site-directed mutagenesis and/or other techniques for affinity maturation known per se. Suitable techniques for generating such immunoglobulin sequences will be clear to the skilled person, and for example include the screening techniques reviewed by Hoogenboom, Nature Biotechnology, 23, 9, 1105-1116 (2005). Other techniques for generating immunoglobulins against a specified target include for example the Nanoclone technology (as for example described in the published US patent application 2006-0211088), so-called SLAM technology (as for example described in the European patent application 0 542 810), the use of transgenic mice expressing human immunoglobulins or the well-known hybridoma techniques (see for example Larrick et al, Biotechnology, Vol.?, 1989, p. 934). All these techniques can be used to generate immunoglobulins against VEGF, and the CDR's of such immunoglobulins can be used in the Nanobodies of the invention, i.e. as outlined above. For example, the sequence of such a CDR can be determined, synthesized and/or isolated, and inserted into the sequence of a Nanobody of the invention (e.g. so as to replace the corresponding native CDR), all using techniques known per se such as those described herein, or Nanobodies of the invention containing such CDR's (or nucleic acids encoding the same) can be synthesized de novo, again using the techniques mentioned herein.

[0881] Further uses of the amino acid sequences, Nanobodies, polypeptides, nucleic acids, genetic constructs and hosts and host cells of the invention will be clear to the skilled person based on the disclosure herein. For example, and without limitation, the amino acid sequences of the invention can be linked to a suitable carrier or solid support so as to provide a medium than can be used in a manner known per se to purify VEGF from compositions and preparations comprising the same. Derivatives of the amino acid sequences of the invention that comprise a suitable detectable label can also be used as markers to determine (qualitatively or quantitatively) the presence of VEGF in a composition or preparation or as a marker to selectively detect the presence of VEGF on the surface of a cell or tissue (for example, in combination with suitable cell sorting techniques).

[0882] The invention will now be further described by means of the following non-limiting examples and figures, in which the Figures show:

[0883] FIG. 1: Screening of periplasmic extracts for blocking of VEGF-VEGFR-2 and VEGF-VEGFR-1 interactions in ELISA as described in Example 2. Well H12 contains no expressed Nanobody and is used as background sample, in order to calculate the % blocking.

[0884] FIG. 2: Evaluation of the neutralizing capacity of purified monovalent (FIG. 2A) and bivalent (FIG. 2B) anti-VEGF Nanobodies in the VEGF-VEGFR-1 and VEGF-VEGFR-2 alpha screen assays as described in Example 3.

[0885] FIG. 3: Evaluation of the neutralizing capacity of purified bivalent anti-VEGF Nanobodies in the HUVEC cell proliferation assay as described in Example 4.

[0886] FIG. 4: Screening of anti-VEGF Nanobody periplasmic extracts for binding to VEGF109 as described in Example 6. Negative controls (no periplasmic extract of Nanobody added) are present in wells G6, H6, G12 and F112.

[0887] FIG. 5: Evaluation of the neutralizing capacity of periplasmic extracts of anti-VEGF Nanobodies in a VEGF-VEGFR1 and VEGF-VEGFR2 ELISA as described in Example 8. Negative controls (no periplasmic extract of Nanobody added) are present in wells E12 and F12.

### EXAMPLES

### Example 1

### Identification of VEGF binding Nanobodies

### Immunizations

[0888] Two llamas (No. 99 and No. 102) were immunized, according to standard protocols, with 6 intramuscular injections (100 or 50 μg/dose at weekly intervals) of hVEGF165 (R&D Systems, Minneapolis, Minn., US) formulated in Titermax. Gold (Titermax USA, Norcross, Ga., US). At week 4, sera were collected to define antibody titers against hVEGF165 by ELISA. In short, 96-well Maxisorp plates (Nunc Wiesbaden, Germany) were coated with hVEGF165. After blocking and adding diluted sera samples, the presence of anti-hVEGF165 Nanobodies was demonstrated by using rabbit anti-llama immunoglobulin antiserum and anti-rabbit immunoglobulin alkaline phosphatase conjugate. The titer exceeded 16000 for both animals.

### Library Construction

[0889] Peripheral blood mononuclear cells were prepared from the serum samples using Ficoll-Hypaque according to the manufacturer's instructions. Next, total RNA was extracted from these cells and used as starting material for RT-PCR to amplify Nanobody encoding gene fragments. These fragments were cloned into an expression vector derived from pUC119 which contained the LacZ promoter, a coliphage pIII protein coding sequence, a resistance gene for ampicillin or carbenicillin, a multicloning site and the gen3 leader sequence. In frame with the Nanobody coding sequence, the vector coded for a C-terminal c-myc tag and a (His)6 tag. Phage was prepared according to standard methods (see for example the prior art and applications filed by applicant cited herein) and stored after filter sterilization at 4° C. for further use.

### Selections

[0890] Phage libraries obtained from llamas No. 99 and No. 102 were used for different selections.

[0891] In a first selection, hVEGF121 (R&D Systems, Minneapolis, Minn., US) was coated onto Maxisorp 96-well plates (Nuns, Wiesbaden, Germany) at 1 and 0.2 μg/ml. Following incubation with the phage libraries and extensive washing, bound phage was a specifically eluted with trypsin (1 mg/ml) or glycin (0.1 M).

[0892] In a second selection, biotinylated hVEGF165 (R&D Systems, Minneapolis, Minn., US) was captured on a neutravidin coated solid phase. Following incubation with the phage libraries and extensive washing, bound phage was specifically eluted with Avastin® (Genentech, Roche), VEGFR1 or VEGFR2.

[0893] In a third selection, soluble biotinylated hVEGF165 was incubated with the phage libraries. After extensive washing, the biotinylated hVEGF165 was captured on a neutravidin coated solid phase. Bound phage was specifically eluted with Avastin®, VEGFR1 or VEGFR2.

[0894] In all selections, enrichment was observed. The output from each selection was recloned as a pool into an expression vector derived from pUC119 which contained the LacZ promoter, a resistance gene for ampicillin or carbenicillin, a multicloning site and the gen3 leader sequence. In frame with the Nanobody coding sequence, the vector coded for a C-terminal c-myc tag and a (His)6 tag. Colonies were picked and grown in 96 deep well plates (1 ml volume) and induced by adding IPTG for Nanobody expression. Periplasmic extracts (volume: ˜80 μl) were prepared according to standard methods (see for example the prior art and applications filed by applicant cited herein). The sequences of the clones obtained are depicted in Table B-1.

### Example 2

### Screening for VEGF blocking Nanobodies

[0895] The periplasmic extracts obtained in Example 1 were screened in VEGFR1 and VEGFR2 ELISA's to evaluate the blocking capacity of the expressed Nanobodies. ELISA's were performed as follows: 1 μg/ml VEGFR1-Fc and VEGFR2-Fc (R&D Systems; Minneapolis, Minn., US) chimeras were coated overnight at 4° C. The plates were washed 5 times with 300 μl PBST and then blocked with 300 μl PBS/1% casein during 2 h at RT. This was followed by 5 washes with 300 μl PBST. 1/10 diluted periplasmic extracts were pre-incubated with 2 nM hVEGF165 during 1 h at RT. The pre-incubation mixture was added to the ELISA plate and incubated during 10 min at RT. The plate was subsequently washed 5 times with 300 μl PBST and 100 μl biotinylated anti-VEGF (R&D Systems, Minneapolis, Minn., US) was added. After washing, 100 μl streptavidin-HRP (DAKO, Glostrup, Denmark) was added. After washing, 100 μl 3,3′,5,5′-tetramethylbenzidine (TMB) (Pierce, Rockford, Ill., US) was added. The reaction was stopped with 100 μl 2M H₂SO₄ and the OD was read at 450 nm.

[0896] Alternatively biotinylated hVEGF165 was preincubated with periplasmic extracts and VEGF—receptor binding was detected using streptavidin—HRP.

[0897] Screening of the extracts in these VEGFR1 and VEGFR2 ELISA's identified clones that can block the VEGF-VEGFR1 and/or VEGFR2 interaction up to 50% (FIG. 1).

### Example 3

### Evaluation of the VEGF Blocking Nanobodies in Alphascreen Assay

[0898] The blocking interaction of the purified Nanobodies was then evaluated in a VEGFR1 and a VEGFR2 Alphascreen assay. VEGFR1and VEGFR2 Fc chimera (R&D systems, Minneapolis, Minn., US) were coupled to acceptor beads according to manufacturer instructions (Perkin Elmer, Waltham, Mass., US). hVEGF165 was biotinylated using biotin (Sigma, St Louis, Mo., US) and biotinamidohexanoic acid 3-sulfo-N-hydroxysuccinimide ester sodium salt (Sigma, St Louis, Mo., US). This biotinylated hVEGF165 was shown to be still functional for VEGFR1 and VEGFR2 binding using ELISA.

[0899] Binding of VEGF to the respective receptors was determined by adding 10 μl of biotinylated hVEGF165 (2.5 nM) to 5 μl of VEGFR2 or VEGFR1 acceptorbeads (100 μg/ml). After 45 min incubation at RT and in the dark, 5 μStreptavidin donor beads (100 μg/ml) were added, followed by an incubation during 1 hr at RT and in the dark. Upon excitation of the donorbead, the emitted fluorescent signal by the acceptor bead correlated with the levels of VEGF bound to the respective receptor.

[0900] The neutralizing capacity of the anti-VEGF Nanobodies was determined as follows in the alpha screen assays. A Nanobody dilution series, starting from 2 μM was prepared and pre-incubated with biotinylated hVEGF165 during 30 minutes at RT. To this mixture, the VEGFR acceptor beads and the streptavidin donor beads were added and the experiment was performed as described previously. The observed decrease in fluorescence signal with increasing concentrations of the Nanobodies indicated the blocking of the VEGF binding to the respective receptors. FIG. 2A shows the decreased VEGF-VEGFR2 interaction observed with increased concentrations of anti-VEGF Nanobodies. This indicates that the Nanobodies of the invention interfere with the VEGF-VEGFR2 interaction.

[0901] To evaluate whether bivalent and bispecific anti-VEGF Nanobodies could have a similar effect, bivalent and bispecific construct were generated using a GGGGSGGGS (SEQ ID NO: 678) linker and/or a GGGGSGGGGSGGGGSGGGGSGGGGSGGGGS (SEQ ID NO: 679) linker (Tables B-3, B-4, B-5 and 13-6), expressed and purified according to standard methods (see for example the prior art and applications filed by applicant cited herein).

[0902] Evaluation of 1H10-1H10 and 1C4-1C4 in the VEGFR2 alpha screen assay, showed that these molecules are also able to block the VEGF-VEGFR2 interaction (FIG. 2B).

### Example 4

### Anti-VEGF Nanobodies can Block VEGF Induced HUVEC Cell Proliferation

[0903] VEGF is a known stimulator of endothelial cell proliferation and the neutralization capacity of VEGF antagonists can therefore be determined in an assay evaluating the proliferation of endothelial cells.

[0904] HUVEC (human umbilical vein endothelial cells) (Cambrex, Verviers, Belgium) were cultured in EBM2 supplemented medium at 37° C. Two days before the start of the experiment, the cells were made quiescent using RPMI 1640/M119 medium (1:1) containing 10% FCS, 10% human AB serum and 1% penicillin—streptomycin (PS). Cells were seeded in a 96 well plate at a cell density of 3750 cells/well in M199 medium containing 5% FCS and 1% PS and incubated at 37° C. in a humidified chamber. The anti-VEGF Nanobodies were pre-incubated with hVEGF165 during 1 h. 6 h after seeding, the VEGF Nanobody mixture was added to the cells, resulting in a final concentration of 10 ng/ml hVEGF165. After 1 day and 4 days, additional hVEGF165 was added. At day 4 BrdU was added to the cells. The cells were further incubated for another 18 h and the BrdU incorporation was determined using the chemiluminescent BrdU cell proliferation ELISA (Roche, Mannheim, Germany). An LPS low preparation (<100 Eu/mg) of bivalent anti-VEGF Nanobody (1H10-1H10) and a negative control Nanobody (12B2) were tested in this assay. Inhibition of the VEGF stimulated proliferation was observed only for the 1H10-1H10 bivalent Nanobody, underscoring the VEGF neutralizing activity by the anti-VEGF Nanobodies (FIG. 3).

### Example 5

### Identification of VEGF Binding Nanobodies

### Immunizations

[0905] Two llamas (No. 150 and No. 151) were immunized, according to standard protocols, with 5 intramuscular injections (100 or 50 μg/dose at 2-weekly intervals) of hVEGF165-KLH (R&D Systems, Minneapolis, Minn., US) formulated in Stimune (Cedi Diagnostics, the Netherlands). One month later, this was followed by 4 intramuscular injections of E. coli expressed VEGF109 (APMAEGGGQNHHEVVKFMDVYQRSYCHPIETLVDIFQEYPDEIEYIFKP SCVPLMRCGGCCNDEGLECVPTEESNITMQIMRIKPHQGQHIGEMSFLQHNKCECRP KKD; SEQ ID NO: 680) formulated in Stimune (100 or 50 μg/dose at 1 weekly and 2-weekly intervals).

### Library Construction

[0906] Peripheral blood mononuclear cells were prepared from the serum samples using Ficoll-Hypaque according to the manufacturer's instructions. Next, total RNA was extracted from these cells and used as starting material for RT-PCR to amplify Nanobody encoding gene fragments. These fragments were cloned into an expression vector derived from pUC119 which contained the LacZ promoter, a coliphage pIII protein coding sequence, a resistance gene for ampicillin or carbenicillin, a multicloning site and the gen3 leader sequence. In frame with the Nanobody coding sequence, the vector coded for a C--terminal c-myc tag and a (His)6 tag. Phage was prepared according to standard methods (see for example the prior art and applications filed by applicant cited herein) and stored after filter sterilization at 4° C. for further use.

### Selections

[0907] Phage libraries obtained from llamas No. 150 and No. 151 were used for selections. In a first selection round, biotinylated hVEGF165 (R&D systems, Minneapolis, Minn., US) was captured onto a neutravidin coated Maxisorp 96-well plate (Nunc, Wiesbaden, Germany) at 2-0.2 μg/ml. Following incubation with the phage libraries and extensive washing, bound phage was eluted a-specifically with TEA. The phages were rescued and used in a next selection round.

[0908] In the second round, biotinylated hVEGF109 was captured on a neutravidin coated Maxisorp 96-well plate at 2-0.02 μg/ml. Following incubation with the phage libraries and extensive washing, bound phage was eluted a-specifically with triethanolamine (TEA). The phages were rescued, plated, individual colonies were picked and periplasmic extracts were generated.

[0909] Sequences of the clones obtained are depicted in Table B-2.

### Example 6

### Screening for VEGF Binding Nanobodies

[0910] The periplasmic extracts obtained in Example 5 were screened in a VEGF109 ELISA. ELISA's were performed as follows: 1 μg/ml biotinylated VEGF109 was captured during 30 minutes in a neutravidine coated plate. The plates were washed 5 times with 300 μl PBST. Periplasmic extracts were diluted 1/10 in 0.1% Casein/PBS, added to the ELISA plate and incubated during 1 h at RT. The plate was subsequently washed 5 times with 300 μl PBST. After washing 1/2000 anti-myc (Roche, Basel, Switzerland) was added and incubated during 1 h. The plate was subsequently washed 5 times with 300 μl PBST. After washing, anti-mouse horse radish peroxidase (HRP) (DAKO, Glostrup, Denmark) was added and binding was detected using 3,3′,5,5′-tetramethylbenzidine (TMB) (Pierce, Rockford, Ill., US). The reaction was stopped with 100 μl 2M H₂SO₄ and read the OD at 450 nm.

[0911] Screening of the extracts in this VEGF109 ELISA identified clones that can bind VEGF109 (FIG. 4).

### Example 7

### Evaluation of the off Rate of the VEGF Binding Nanobodies in SPR Analysis

[0912] VEGF109 and VEGF165 were coated on a CM5 chip and the binding kinetics of periplasmic extracts of the anti-VEGF Nanobodies obtained in Example 5 was assessed using a Biacore 3000. Analysis of the results was done using BIAevaluation software. Off-rates were determined by the ‘fit kinetics separate ka/kd’ model, langmuir dissociation. A time interval of ±100s was used for the fitting. The dissociation curves indicated off rates ranging from 10⁻¹ to 10⁻⁴ /s (Table C-1).

[0913] The results indicate that the Nanobodies interact with both VEGF165 and VEGF109.

### Example 8

### Anti-VEGF Nanohodies can Block the VEGF-VEGFR1 and VEGF-VEGFR2 Interaction

[0914] The neutralizing capacity of the anti-VEGF Nanobodies was evaluated in VEGF165-VEGFR1 and VEGF165-VEGFR2 ELISA.

[0915] VEGFR1-Fc and VEGFR2-Fc (R&D Systems, US) were solid phase coated overnight in a MaxiSorp plate. The following day, the plate was washed with PBS and blocked with PBS/1% casein. 1/5 dilutions of the periplasmic extracts of the Nanobodies were precincubated during 1 h with 2 nM biotinylated VEGF165 and then added for 10 minutes to the VEGFR1 or VEGFR2 coated plates. After washing with PBST, the binding of the biotinylated VEGF165 to the receptors was detected using Extravidin-HRP (Sigma, St. Louis, Mo., US) and TMB (Pierce, Rockford, Ill., US), after which the reaction was stopped with H₂SO4. The OD at 450 nm was measured and the resulting values correlate with VEGF binding. The results shown in FIG. 5 indicate that periplasmic extracts of anti-VEGF Nanobodies can block the interaction between VEGF and VEGFR1 and between VEGF and VEGFR2 up till 90% compared to the negative control which only contains biotinylated VEGF (wells E12 and F12).

TABLE B-1
Preferred Nanobodies against VEGF

<VEGF PMP1A1, SEQ ID NO: 441;PRT;->
EVQLVESGGGLVQAGGSLRLSCAASGRTFSSLAMGWFRQAPGKDREFVVV
VSGSGGTTKYADSVKGRFTISRDNNKNAVYLQMNSLKPEDTAVYYCAADP
SRYFITTDRRGYDYWGQGTQVTVSS
<VEGF PMP19C6, SEQ ID NO: 442;PRT;->
KVQLVESGGGLVQAGGSLRLSCAASGRSFSDNVMGWFRQAAGKEREFVAH
ISRGGSRTEYADSVKGRFTISRDNAKKTVYLQMNSLKPEDTAVYYCAASR
GVALATARPYDYWGQGTQVTVSS
<VEGF PMP1D1, SEQ ID NO: 443;PRT;->
EVQLVESGGGLVQVGGSLRLSCAASGRTFSSARMGWFRQCPGKEREFVAA
ISWSNDITYYEDSVKGRFTISRDNAKATVYLQMNSLKLEDTAVYYCAASW
RSSIWIPAESDSYDFWAQGTQVTVSS
<VEGF PMP1D10, SEQ ID NO: 444;PRT;->
EVQLVESGGGLVQPGGSLRLACAVSGFTMSSSWMYWVRQAPGKGLEWVSS
ISPGGLFPYYVDSVKGRFSISTDNANNILYLQMNSLKPEDTALYSCAKGG
APNYTPRGRGTQVTVSS
<VEGF PMP25H1, SEQ ID NO: 445;PRT;->
EVQLVESGGGLVQPGGSLRLSCAASGFTFSSYSMIWVRQAPGKGLEWVSE
ISSGGGWTSYADSVKGRFTISRDNAKNTLYLQMNSLKPEDTAVYYCVQSH
RTPRSQGTQVTVSS
<VEGF PMP1F7, SEQ ID NO: 446;PRT;->
EVQLVESGGGLVQFGGSLRLSCAASGFTFSNYWMYWLRQAPGKGLESVSS
INTGGARTFYADSVKGRFTISRDNAKNTLYLQMNSLKSEDTAVYYCAKDA
AGRTRGQGTQVTVSS
<VEGF PMP25G2, SEQ ID NO: 447;PRT;->
EVQLVESGGDLVQPGGSLRLSCAASGFTFSRYEMSWVRQAPGKGLEWVSG
ISTGGGWRTYADSVKGRFTISRDNAKNTLYLQMNSLKPEDTAVYYCLNRD
YGTSWADFPSWGQGTQVTVSS
<VEGF PMP1H10, SEQ ID NO: 448;PRT;->
EVQLVESGGGLVQFGGSLRLSCAASGFTVSSYTMYWARQAPGKELEWVSI
IFTNGEGTYYSDSVKGRPTVSRDNAKNTLYLQMNSLKPEDTALYYCARDP
FGKLKGQGTQVTVSS
<VEGF PMP1D2, SEQ ID NO: 449;PRT;->
EVQLVESGGGLVQAGSSLRLSCVASGRSVSTYGMAWFRQAPGKEREFVAI
NRSTGTIYYADSVKGRFTISRDNAKNTLYLQMNSLKPGDTALYYCAADVF
FSGAHRYEASQWHYWGQGTQVTVSS
<VEGF PMP12E3, SEQ ID NO: 450;PRT;->
EVQLVESGGGLVQPGGSLRLSCAASVRTFSNYFMGWFRQAPGKEREEVAT
IGWSGTDYADSVKGRFTISRDNAKNTVYLQMNSLKPEDTAVYYCAAGYFK
RLGPTSFRDYTYWGQGTQVTVSS
<VEGF PMP7D7, SEQ ID NO: 451;PRT;->
EVQLVESGGGLVQAGGSLRLSCVASGRTFGSYDMGWFRQAPGKEREFVAA
ISTGGGWRRYADSVKGRFTISRDNGKNTMYLQMNSLKPEDTAVYYCAQGW
SLAEFRSWGQGTQVTVSS
<VEGF PMP8F7, SEQ ID NO: 452;PRT;->
EVQLVESGGGLVQAGGSLRLSCAASARTFSSYAMSWFRQAPGKERDFVAV
INWSGGSTYYADSVKGRFTISRDNAKNTVYLEMNSLKPEDTAVYYCASTA
FRRRTYYTPESWDYWGQGTQVTVSS
<VEGF PMP7G6, SEQ ID NO: 453;PRT;->
EVQLVESGGGLVQAGDSLRLSCAASGLTFSAYTMGWFRQAPGKEREFVSA
TSRSGGATLYTDSVKGRFTISRDNAKNTVDLQMNNLKPGDTAVYYCAAKS
RPGYGGTLDYDYWGQGTQVTVSS
<VEGF PMP25B1, SEQ ID NO: 454;PRT;->
EVQLVESGGGLVQSGGSLRLSCAASGLAFSTYAMGWFRQAPGKDREMVIA
LNWSGDRTWYLNSVKGRFTISRDNAKNTVSLQMNSLKPEDTAVYYCAAKA
SGTIRGGSYYDSAGYSHWGQGTQVTVSS
<VEGF PMP25E1, SEQ ID NO: 455;PRT;->
EVQLVESGGGLVQAGVSLRLSCAASGRTFGNYNMGWFRQAQGKDRELVAA
IRWSEDRVWYLGSVRGRFTISRDNAKNTVYLQMNSLKPEDTAAYYCAAQD
RRRGDYYTFDYHYWGQGTQVTVSS
<VEGF PMP25D1, SEQ ID NO: 456;PRT;->
EVQLVESGGRLVQAGGSLRLSCAASGGIFSRYNMGWFRQAPGKEREFVAA
AHWSGGRMWYKDSVKGRFTMSRDNNKNTVYLQMNSLKSEDTAVYYCAADS
GAWGGSYYRAEEYVYWGQGTQVTVSS
<VEGF PMP25C1, SEQ ID NO: 457;PRT;->
EVQLVESGGGLVQAGASLRLSCAASSRTFSSYDMGWFRQAPGKERALVAA
ITSSSGRRWYADSVLGRPTISRDNAKNTVSLQMSSLRPEDTAVYYCAARG
RVDYNYYNKDAYTYWGQGTQVTVSS
<VEGF PMP25D3, SEQ ID NO: 458;PRT;->
EVQLVESGGRLVQAGDSLRLSCAASGGTVRNYAMGWFRQAPGQEREILSS
ITRTDNITYYEDSVKGRFTIVRDTAKNTVYLQMNSLKPEDTAVYYCAAAM
THFAVLEREYGYWGQGTQVTVSS
<VEGF PMP14G5, SEQ ID NO: 459;PRT;->
EVQLVESGGGLVQAGGSLRLSCAASGRTISSYTMGWFRQAPGKEREFVAA
GTWSTSVTEYADSVKGRFTISRDTAKNTLYLQMNSLKPEDTAVYYCAAEP
YIPVRTMRHMTFLTYWGQGTQVTVSS
<VEGF PMP1C4, SEQ ID NO: 460;PRT;->
EVQLVESGGGLVQAGGSLRLSCAPSGRDISSYIMGWFRQAPGKEREFTAD
INWNGSWRFYAESVNGRFTISRDNAKNTVYLQMNSLKPEDTAVYYCAAKE
RGSGAYDYWGQGTQVTVSS

TABLE B-2
Preferred Nanobodies against VEGF

>PVEGFPMP42B10, SEQ ID NO: 461;PRT;->
EVQLVESGGGLVQAGGSLRLSCTASGRALDTYTVTWFRQTPGKEREFVAS
NRWNAKPYTTDSVKGRFTISRDNAKNTVYLQMNSLKPEDTAVYYCAADLT
TWADGPYRYWGQGTQVTVSS
>PVEGFPMP42C5, SEQ ID NO: 462;PRT;->
KVQLVESGGGLVQAGGSLRLSCAASGRALDTYTVTWFRQTPGKEREFVAS
IRWNAKPYTTDSVKGRPTISRDNAKNTVYLQMNSLKPEDTAIYYCAADLT
TWADGPYRYWGQGTQVTVSS
>PVEGFPMP42H5, SEQ ID NO: 463;PRT;->
EVQLVESGGGLVQAGGSLRLSCTASGRALDTYTVTWFRQTPGKEREFVAS
NRWNAKPYVTDSVKGRFTISRDNAKNTVYLQMNSLKPEDTAVYYCAADLT
TWADGPYRYWGQGTQVTVSS
>PVEGFPMP42E12, SEQ ID NO: 464;PRT;->
EVQLVESGGGLVQAGGSLRLSCAASGRALDTYTVTWFRQTPGKEREFVAS
VRWNAKPYTTDSVKGRFTISRDNAKNTVYLQMNSLKPEDTAVYYCAADLT
TWADGPYRFWGQGTQVTVSS
>PVEGFPMP42E2, SEQ ID NO: 465;PRT;->
EVQLVESGGGLVQAGGSLRLSCAASGRALDTYTVTWFRQTPGKGREFLAS
IRWNAKPYTTDSVKGRFTMSRDNAKNTVYLQMNSLRPEDTAVYYCAADPT
TWADGPYRYWGQGTQVTVSS
>PVEGFPMP42F1, SEQ ID NO: 466;PRT->
EVQLVESGGGLVQPGGSLRLSCAASGRALDTYTVTWFRQTPGKTREFVAS
VRWNAKPYTTDSVKGRFTISRDNAKNTVYLQMNSLKPEDTAVYYCAADPT
TWADGPYRYWGQGTQVTVSS
>PVEGFPMP42G5, SEQ ID NO: 467;PRT;->
EVHLVESGGGLVQAGGSLRLSCAASGRALDTYTVTWFRQTPGKTREFVAS
VRWNAKPYTTDSVKGRFTISRDNAKNTVYLQMNSLKPEDTAVYYCAADPT
TWADGPYRYWGQGTQVTVSS
>PVEGFPMP42A9, SEQ ID NO: 468;PRT;->
EVQLVESGGGLVQPGGSLRLSCAASGFTLDYYGIGWFRQAPGKEREWVSC
ISSSGGSTYYADSVKGRFTISRDNAKNTVYLQMNSLKPEDTAVYYCAAQK
GTPPLGCPAYYGMDYWGKGTLVTVSS
>PVEGFPMP42B5, SEQ ID NO: 469;PRT;->
EVQLVESGGGLVQPGGSLRLSCAASGFTLDYYGIGWFRQAPGKEREWVSC
ISSSGGSTYYADSVKGRFTISRDNAKNTVYLQMNSLKPEDAAVYYCAAQK
GTPPLGCPAYYGMDYWGKGTLVTVSS
>PVEGFPMP42A5, SEQ ID NO: 470;PRT;->
EVQLVESGGGLVQAGGSLRLSCAASGRTFSGVDVAWFRQAPGKEREFVAA
LAWSGIRTYYAVSVKGRFTISRGDPNDTVYLQMTSLKPEDTAVYYCATGR
ASRTSDYYTDRIYDSWGQGAQVTVSS
>PVEGFPMP42A3, SEQ ID NO: 471;PRT;->
>EVPMVESGGGLVQAGGSLRLSCAASGRTFSGVDVAWFRQAPGKEREFVA
ALAWSGIRTYYAVSVKGRFTISRGDPNDTVYLQMTSLKPEDTAVYYCATG
RASRTSDYYTDRIYDSWGQGAQVTVSS
>PVEGFPMP42F10, SEQ ID NO: 472;PRT;->
EVQLVESGGGLVQAGGSLRLSCAASGRTFSGVDVAWFRQATGKEREFVAA
LAWSGIRTYYAVSVKGRFTISRGDPNDTVYLQMTSLKPEDTAVYYCATGR
ASRTSDYYTDRIYDSWGQGAQVTVSS
>PVEGFPMP42A11 SEQ ID NO: 473;PRT;->
EVQLVESGGGLVQAGGSLRLSCAASGRTFSGVDVAWFRQAPGKEREFVAA
LAWSGIRTYYAVSVKGRFTISRGDPNDTVYLQMTSLKPEDTAVYYCATGR
ASSTSDYYTDRIYDSWGQGAQVTVSS
>PVEGFPMP42C1, SEQ ID NO: 474;PRT;->
EVQLVESGGGLVQAGGSLRLSCAASGRTFSGVDVAWFRQAPGKEREFVAA
LAWSGIRTYYAVSVKGRFTISRGNPNDTVYLQMTSLKPEDTAVYYCATGR
AYRGSDYYTDRIYDSWGQGAQVTVSS
>PVEGFPMP42C12, SEQ ID NO: 475;PRT;->
EVQLVESGGGLVQPGGSLRLSCAASGRALSSYSVGWFRQAPGKEREFVTA
ISWSVPYYADSVKGRFTISRDNAKNTVYLQMNSLKPEDTAVYYCAADSLY
WRSSRMATDYDYWGQGTQVTVSS
>PVEGFPMP42H9, SEQ ID NO: 476;PRT;->
EVQLVESGGGLVQAGGALRLSCAASGRTFETYRMGWFRQAPGKEREFVAL
INWSSGTTVYADSVKGRFTISGDNAKDTVYLEMNSLKPEDTAVYYCAVGR
RWSGSYYSALAYQYWGQGTQVTVSS
>PVEGFPMP42E3, SEQ ID NO: 477;PRT;->
EVQLVESGGGLVQAGGALRLSCAASGRTFETYRMGWFRQAPGKEREFVAL
INWSSGTTIYADSVKGRFTISGDNAKDTVYLEMNSLKPEDTAVYYCAVGR
RWSGSYYSALAYQYWGQGTQVTVSS
>PVEGFPMP42C7, SEQ ID NO: 478;PRT;->
EVQLVESGGGLVQAGGALRLSCAASGRTFETYRMGWFRQAPGKEREFVAL
INWSSGTTIYADSVKGRFTISGDNAKDTVYLEMNSLKPEDTAVYYCAVGR
RWSGSYYSALAYQYWGKGTQVTWSS
>PVEGFPMP42D5, SEQ ID NO: 479;PRT;->
EVQLVESGGGLVHAGGALRLSCAASGRAFETYRMGWFRQAPGKEREFVAL
INWSSGTTVYADSVKGRFTISGDNAKDTVYLEMNSLKPEDTAVYYCAVGR
RWSGSYYSALAYQYWGQGTQVTVSS
>PVEGFPMP42D7, SEQ ID NO: 480;PRT;->
EVQLVESGGGLVQAGGALRPSCAASGRTFETYRMGWFRQAPGKEREFVAL
INWSSGTTVYADSVKGRFTISGDNAKDTVYLEMNSLKPEDTAVYYCAVGR
RWSGSYYSALAYQYWGQGTQVTVSS
>PVEGFPMP42C10, SEQ ID NO: 481;PRT;->
EVQLVESGGGLVQAGGALRLSCAVSGRTFESYRMGWFRQAPGKEREFVSL
INWSSGKTIYADSVKGRFTISGDNAKDTVYLEMNSLKPEDTAVYYCAVGR
AWSGSYYSALAYQYWGQGTQVTVSS
>PVEGFPMP42D10, SEQ ID NO: 482;PRT;->
EVQLVESGGGLVQAGGALRLSCAASGRTFETYRMGWFRQAPGKEREFVAL
INWSSGITVYLDSVKGRFTISGDNAKDPVYLEMNSLKPEDTAVYYCAVGR
AWSGSYYSALAYQYWOQGTQVTVSS
>PVEGFPMP42E4, SEQ ID NO: 483;PRT;->
EVQLMESGGGLVQAGGSLRLSCAVSGRTFESYRMGWFRQAPGKEREFVSL
INWSSGKTIYADSVKGRFTISGDNAKDTVYLEMNSLKPEDTAVYYCAVGR
AWSGSYYSALAYQYWGQGTQVTVSS
>PVEGFPMP42B4, SEQ ID NO: 484;PRT;->
EVQLVESGGGSVQAGGALRLSCAVSGRTFESYRMGWFRQAPGKEREFVSL
INWSSGKTIYADSVKGRFTISGDNAKDTVYLEMNSLKPEDTAVYYCAVGR
AWSGSHYSALAYQYWGQGTQVTVSS
>PVEGFPMP42B11, SEQ ID NO: 485;PRT;->
EVQLVESGGGLVQTGGSLRLSCAASGRTFCTYAMAWFRQSPKNEREFVAT
LRWSDGSTYYADSVKGRFTIAGDNAKNTVYLQMNNLKPEDTAVYYCAADR
WFSYTTYDATDTWHYWGQGTQVTVSS

TABLE B-3
Bivalent Nanobodies against VEGF

<VEGF PMP1H9-9GS-1H9, SEQ ID NO: 486;PRT;->
EVQLVESGGGLVQAGGSLRLSCAASGRTFSSLAMGWFRQAPGKDREFVVV
VSGSGGTTKYADSVKGRFTISRDNNKNAVYLQMNSLKPEDTAVYYCAADP
SRYFITTDRRGYDYWGQGTQVTVSSGGGGSGGGSEVQLVESGGGLVQAGG
SLRLSCAASGRTFSSLAMGWFRQAPGKDREFVVVVSGSGGTTKYADSVKG
RFTISRDNNKNAVYLQMNSLKPEDTAVYYCAADPSRYFITTDRRGYDYWG
QGTQVTVSS
<VEGF PMP19C6-9GS-19C6, SEQ ID NO: 487;PRT;->
KVQLVESGGGLVQAGGSLRLSCAASGRSFSDNVMGWFRQAAGKEREFVAH
ISRGGSRTEYADSVKGRFTISRDNAKKTVYLQMNSLKPEDTAVYYCAASR
GVALATARFYDYWGQGTQVTVSSGGGGSGGGSKVQLVESGGGLVQAGGSL
RLSCAASGRSFSDNVNGWFRQAAGKEREFVAHISRGGSRTEYADSVKGRF
TISRDNAKKTVYLQMNSLKPEDTAVYYCAASRGVALATARPYDYWGQGTQ
VTVSS
<VEGF PMP1D1-9GS-1D1, SEQ ID NO: 488;PRT;->
EVQLVESGGGLVQVGGSLRLSCAASGRTFSSARMGWFRQCPGKEREFVAA
ISWSNDITYYEDSVKGRFTISRDNAKATVYLQMNSLKLEDTAVYYCAASW
RSSIWIPAESDSYDFWAQGTQVTVSSGGGGSGGGSEVQLVESGGGLVQVG
GSLRLSCAASGRTFSSARMGWFRQCPGKEREFVAAISWSNDITYYEDSVK
GRFTISRDNAKATVYLQMNSLKLEDTAVYYCAASWRSSIWIPAESDSYDF
WAQGTQVTVSS
<VEGF PMP1D10-9GS-1D10, SEQ ID NO: 489;PRT;->
EVQLVESGGGLVQPGGSLRLACAVSGFTMSSSWMYWVRQAPGKGLEWVSS
ISPGGLFPYYVDSVKGRFSISTDNANNILYLQMNSLKPEDTALYSCAKGG
APNYTPRGRGTQVTVSSGGGGSGGGSEVQLVESGGGLVQPGGSLRLACAV
SGFTMSSSWMYWVRQAPGKGLEWVSSIPGGLFPYYVDSVKGRFSISTDNA
NNILYLQMNSLKPEDTALYSCAKGGAPNYTPRGRGTQVTVSS
<VEGF PMP25H1-9GS-25H1, SEQ ID NO: 490;PRT;->
EVQLVESGGGLVQPGGSLRLSCAASGFTFSSYSMIWVRQAPGKGLEWVSE
ISSGGGWTSYADSVKGRFTISRDNAKNTLYLQMNSLKPEDTAVYYCVQSH
RTPRSQGTQVTVSSGGGGSGGGSEVQLVESGGGLVQPGGSLRLSCAASGF
TFSSYSMIWVRQAPGKGLEWVSEISSGGGWTSYADSVKGRFTISRDNAKN
TLYLQMNSLKPEDTAVYYCVQSHRTPRSQGTQVTVSS
<VEGF PMP1F7-9GS-1F7, SEQ ID NO: 491;PRT;->
EVQLVESGGGLVQPGGSLRLSCAASGFTFSNYWMYWLRQAPGKGLESVSS
INTGGARTFYADSVKGRFTISRDNAKNTLYLQMNSLKSEDTAVYYCAKDA
AGRTRGQGTQVTVSSGGGGSGGGSEVQLVESGGGLVQPGGSLRLSCAASG
FTFSNYWMYWLRQAPGKGLESVSSINTGGARTFYADSVKGRFTISRDNAK
NTLYLQMNSLKSEDTAVYYCAKDAAGRTRGQGTQVTVSS
<VEGF PMP25G2-9GS-25G2, SEQ ID NO: 492;PRT;->
EVQLVESGGDLVQPGGSLRLSCAASGFTFSRYEMSWVRQAPGKGLEWVSG
ISTGGGWRTYADSVKGRFTISRDNAKNTLYLQMNSLKPEDTAVYYCLNRD
YGTSWADFPSWGQGTQVTVSSGGGGSGGGSEVQLVESGGDLVQPGGSLRL
SCAASGFTFSRYEMSWVRQAPGKGLEWVSGISTGGGWRTYADSVKGRFTI
SRDNAKNTLYLQMNSLKPEDTAVYYCLNRDYGTSWADFPSWGQGTQVTVS
S
<VEGF PMP1H10-9GS-1H10, SEQ ID NO: 493;PRT;->
EVQLVESGGGLVQPGGSLRLSCAASGFTVSSYTMYWARQAPGKELEWVSI
IFTNGEGTYYSDSVKGRFTVSRDNAKNTLYLQMNSLKPEDTALYYCARDP
FGKLKGQGTQVTVSSGGGGSGGGSEVQLVESGGGLVQPGGSLRLSCAASG
FTVSSYTMYWARQAPGKELEWVSIIFTNGEGTYYSDSVKGRFTVSRDNAK
NTLYLQMNSLKPEDTALYYCARDPFGKLKGQGTQVTVSS
<VEGF PMP1D2-9GS-1D2, SEQ ID NO: 494;PRT;->
EVQLVESGGGLVQAGSSLRLSCVASGRSVSTYGMAWFRQAPGKEREFVAI
NRSTGTIYYADSVKGRFTISRDNAKNTLYLQMNSLKPGDTALYYCAADVF
FSGAHRYEASQWHYWGQGTQVTVSSGGGGSGGGSEVQLVESGGGLVQAGS
SLRLSCVASGRSVSTYGMAWFRQAPGKERKFVAINRSTGTIYYADSVKGR
FTISRDNAKNTLYLQMNSLKPGDTALYYCAADVFFSGAHRYEASQWHYWG
QGTQVTVSS
<VEGF PMP12E3-9GS-12E3, SEQ ID NO: 495;PRT;>
EVQLVESGGGLVQPGGSLRLSCAASVRTFSNYFMGWFRQAPGKEREFVAT
IGWSGTDYADSVKGRFTISRDNAKNTVYLQMNSLKPEDTAVYYCAAGYFK
RLGPTSPRDYTYWGQGTQVTVSSGGGGSGGGSEVQLVESGGGLVQPGGSL
RLSCAASVRTFSNYFMGWFRQAPGKEREFVATIGWSGTDYADSVKGRFTI
SRDNAKNTVYLQMNSLKPEDTAVYYCAAGYFKRLGPTSPRDYTYWGQGTQ
VTVSS
<VEGF PMP7D7-9GS-7D7, SEQ ID NO: 496;PRT;->
EVQLVESGGGLVQAGGSLRLSCVASGRTFGSYDMGWFRQAPGKEREFVAA
ISTGGGWRRYADSVKGRFTISRDNGKNTMYLQMNSLKPEDTAVYYCAQGW
SLAEFRSWGQGTQVTVSSGGGGSGGGSEVQLVESGGGLVQAGGSLRLSCV
ASGRTFGSYDMGWFRQAPGKEREFVAAISTGGGWRRYADSVKGRFTISRD
NGKNTMYLQMNSLKPEDTAVYYCAQGWSLAEFRSWGQGTQVTVSS
<VEGF PMP8P7-9GS-8F7, SEQ ID NO: 497;PRT;->
EVQLVESGGGLVQAGGSLRLSCAASARTFSSYAMSWFRQAPGKERDFVAV
INWSGGSTYYADSVKGRFTISRDNAKNTVYLEMNSLKPEDTAVYYCASTA
FRRRTYYTPESWDYWGQGTQVTVSSGGGGSGGGSEVQLVESGGGLVQAGG
SLRLSCAASARTFSSYAMSWFRQAPGKERDFVAVINWSGGSTYYADSVKG
RFTISRDNAKNTVYLEMNSLKPEDTAVYYCASTAFRRRTYYTPESWDYWG
QGTQVTVSS
<VEGF PMP7G6-9GS-7G6, SEQ ID NO: 498;PRT;->
EVQLVESGGGLVQAGDSLRLSCAASGLTFSAYTMGWFRQAPGKEREFVSA
TSRSGGATLYTDSVKGRFTISRDNAKNTVDLQMNNLKPGDTAVYYCAAKS
RPGYGGTLDYDYWGQGTQVTVSSGGGGSGGGSEVQLVESGGGLVQAGDSL
RLSCAASGLTFSAYTMGWFRQAPGKEREFVSATSRSGGATLYTDSVKGRF
TISRDNAKNTVDLQMNNLKPGDTAVYYCAAKSRPGYGGTLDYDYWGQGTQ
VTVSS
<VEGF PMP25B1-9GS-25B1, SEQ ID NO: 499;PRT;->
EVQLVESGGGLVQSGGSLRLSCAASGLAFSTYAMGWFRQAFGKDREMVIA
LNWSGDRTWYLNSVKGRFTISRDNAKNTVSLQMNSLKPEDTAVYYCAAKA
SGTIRGGSYYDSAGYSHWGQGTQVTVSSGGGGSGGGSEVQLVESGGGLVQ
SGGSLRLSCAASGLAFSTYAMGWFRQAPGKDREMVIALNWSGDRTWYLNS
VKGRFTISRDNAKNTVSLQMNSLKPEDTAVYYCAAKASGTIRGGSYYDSA
GYSHWGQGTQVTVSS
<VEGF PMP25E1-9GS-25E1, SEQ ID NO: 500;PRT;->
EVQLVESGGGLVQAGVSLRLSCAASGRTFGNYNMGWFRQAQGKDRELVAA
IRWSEDRVWYLGSVRGRFTISRDNAKNTVYLQMNSLKPEDTAAYYCAAQD
RRRGDYYTPDYHYWGQGTQVTVSSGGGGSGGGSEVQLVESGGGLVQAGVS
LRLSCAASGRTFGNYNMGWFRQAQGKDRELVAAIRWSEDRVWYLGSVRGR
FTISRDNAKNTVYLQMNSLKPEDTAAYYCAAQDRRRGDYYTPDYHYWGQG
TQVTVSS
<VEGF PMP25D1-9GS-25D1, SEQ ID NO: 501;PRT;->
EVQLVESGGRLVQAGGSLRLSCAASGGIFSRYNMGWFRQAPGKERFFVAA
AHWSGGRMWYKDSVKGRFTMSRDNNKNTVYLQMNSLKSEDTAVYYCAADS
GAWGGSYYRAEEYVYWGQGTQVTVSSGGGGSGGGSEVQLVESGGRLVQAG
GSLRLSCAASGGIFSRYNMGWFRQAPGKEREFVAAAHWSGGRMWYKDSVK
GRFTMSRDNNKNTVYLQMNSLKSEDTAVYYCAADSGAWGGSYYRAEEYVY
WGQGTQVTVSS
<VEGF PMP25C1-9GS-25C1, SEQ ID NO: 502;PRT;->
EVQLVESGGGLVQAGASLRLSCAASGRTFSSYDMGWFRQAPGKERALVAA
ITSSGGRRWYADSVLGRFTISRDNAKNTVSLQMSSLRPEDTAVYYCAARG
RVDYNYYNKDAYTYWGQGTQVTVSSGGGGSGGGSEVQLVESGGGLVQAGA
SLRLSCAASGRTFSSYDMGWFRQAPGKERALVAAITSSGGRRWYADSVLG
RFTISRDNAKNTVSLQMSSLRPEDTAVYYCAARGRVDYNYYNKDAYTYWG
QGTQVTVSS
<VEGF PMP25D3-9GS-25D3, SEQ ID NO: 503;PRT;->
EVQLVESGGRLVQAGDSLRLSCAASGGTVRNYAMGWFRQAPGQEREILSS
ITRTDNITYYEDSVKGRFTIVRDTAKNTVYLQMNSLKPEDTAVYYCAAAM
THFAVLEREYGYWGQGTQVTVSSGGGGSGGGSEVQLVESGGRLVQAGDSL
RLSCAASGGTVRNYAMGWFRQAPGQEREILSSITRTDNITYYEDSVKGRF
TIVRDTAKNTVYLQMNSLKPEDTAVYYCAAAMTHFAVLEREYGYWGQGTQ
VTVSS
<VEGF PMP14G5-9GS-14G5, SEQ ID NO: 504;PRT;->
EVQLVESGGGLVQAGGSLRLSCAASGRTISSYTMGWFRQAPGKEREFVAA
GTWSTSVTEYADSVKGRFTISRDTAKNTLYLQMNSLKPEDTAVYYCAAEP
YIPVRTMRHMTFLTYWGQGTQVTVSSGGGGSGGGSEVQLVESGGGLVQAG
GSLRLSCAASGRTISSYTMGWFRQAPGKEREFVAAGTWSTSVTEYADSVK
GRFTISRDTAKNTLYLQMNSLKPEDTAVYYCAAEPYIPVRTMRHMTFLTY
WGQGTQVTVSS
>VEGF PMP1C4-9GS-1C4, SEQ ID NO: 505;PRT;->
EVQLVESGGGLVQAGGSLRLSCAPSGRDISSYIMGWPRQAPGKEREFTAD
INWNGSWRFYAESVNGRFTISRDNAKNTVYLQMNSLKPEDTAVYYCAAKE
RGSGAYDYWGQGTQVTVSSGGGGSGGGSEVQLVESGGGLVQAGGSLRLSC
APSGRDISSYIMGWFRQAPGKEREFTADINWNGSWRFYAESVNGRFTISR
DNAKNTVYLQMNSLKPEDTAVYYCAAKERGSGAYDYWGQGTQVTVSS
>PVEGFPMP42B10-9GS-42B10, SEQ ID NO: 506;PRT;->
EVQLVESGGGLVQAGGSLRLSCTASGRALDTYTVTWFRQTPGKEREFVAS
NRWNAKPYTTDSVKGRFTISRDNAKNTVYLQMNSLKPEDTAVYYCAADLT
TWADGPYRYWGQGTQVTVSSGGGGSGGGSEVQLVESGGGLVQAGGSLRLS
CTASGRALDTYTVTWFRQTPGKEREFVASNRWNAKPYTTDSVKGRFTISR
DNAKNTVYLQMNSLKPEDTAVYYCAADLTTWADGPYRYWGQGTQVTVSS
>PVEGFPMP42C5-9GS-42C5, SEQ ID NO: 507;PRT;->
KVQLVESGGGLVQAGGSLRLSCAASGRALDTYTVTWFRQTPGKEREFVAS
IRWNAKPYTTDSVKGRFTISRDNAKNTVYLQMNSLKPEDTAIYYCAADLT
TWADGPYRYWGQGTQVTVSSGGGGSGGGSKVQLVESGGGLVQAGGSLRLS
CAASGRALDTYTVTWFRQTPGKEREFVASIRWNAKPYTTDSVKGRFTISR
DNAKNTVYLQMNSLKPEDTAIYYCAADLTTWADGPYRYWGQGTQVTVSS
>PVEGFPMP42H5-9GS-42H5, SEQ ID NO: 508;PRT;->
EVQLVESGGGLVQAGGSLRLSCTASGRALDTYTVTWFRQTPGKEREFVAS
NRWNAKPYVTDSVKGRFTISRDNAKNTVYLQMNSLKPEDTAVYYCAADLT
TWADGPYRYWGQGTQVTVSSGGGGSGGGSEVQLVESGGGLVQAGGSLRLS
CTASGRALDTYTVTWFRQTPGKEREFVASNRWNAKPYVTDSVKGRFTISR
DNAKNTVYLQMNSLKPEDTAVYYCAADLTTWADGPYRYWGQGTQVTVSS
>PVEGFPMP42E12-9GS-42E12, SEQ ID NO: 509;PRT;->
EVQLVESGGGLVQAGGSLRLSCAASGRALDTYTVTWFRQTPGKEREFVAS
DRWNAKPYTTDSVKGRFTISRDNAKNTVYLQMNSLKPEDTAVYYCAADLT
TWADGPYRFWGQGTQVTVSSGGGGSGGGSEVQLVESGGGLVQAGGSLRLS
CAASGRALDTYTVTWFRQTPGKEREFVASDRWNAKPYTTDSVKGRFTISR
DNAKNTVYLQMNSLKPEDTAVYYCAADLTTWADGPYRFWGQGTQVTVSS
>PVEGFPMP42E2-9GS-42E2, SEQ ID NO: 510;PRT;->
EVQLVESGGGLVQAGGSLRLSCAASGRALDTYTVTWFRQTPGKGREFLAS
IRWNAKPYTTDSVKGRFTMSRDNAKNTVYLQMNSLRPEDTAVYYCAADPT
TWADGPYRYWGQGTQVTVSSGGGGSGGGSEVQLVESGGGLVQAGGSLRLS
CAASGRALDTYTVTWFRQTPGKGREFLASIRWNAKPYTTDSVKGRFTMSR
DNAKNTVYLQMNSLRPEDTAVYYCAADPTTWADGPYRYWGQGTQVTVSS
>PVEGFPMP42F1-9GS-42F1, SEQ ID NO: 511;PRT;->
EVQLVESGGGLVQPGGSLRLSCAASGRALDTYTVTWFRQTPGKTREFVAS
VRWNAKPYTTDSVKGRFTISRDNAKNTVYLQMNSLKPEDTAVYYCAADPT
TWADGPYRYWGQGTQVTVSSGGGGSGGGSEVQLVESGGGLVQPGGSLRLS
CAASGRALDTYTVTWFRQTPGKTREFVASVRWNAKPYTTDSVKGRFTISR
DNAKNTVYLQMNSLKPEDTAVYYCAADPTTWADGPYRYWGQGTQVTVSS
>PVEGFPMP42G5-9GS-42G5, SEQ ID NO: 512;PRT;->
EVHLVESGGGLVQAGGSLRLSCAASGRALDTYTVTWFRQTPGKTREFVAS
VRWNAKPYTTDSVKGRFTISRDNAKNTVYLQMNSLKPEDTAVYYCAADPT
TWADGPYRYWGQGTQVTVSSGGGGSGGGSEVHLVESGGGLVQAGGSLRLS
CAASGRALDTYTVTWFRQTPGKTREFVASVRWNAKPYTTDSVKGRFTISR
DNAKNTVYLQMNSLKPEDTAVYYCAADPTTWADGPYRYWGQGTQVTVSS
>PVEGFPMP42A9-9GS-42A9, SEQ ID NO: 513;PRT;->
EVQLVESGGGLVQPGGSLRLSCAASGFTLDYYGIGWFRQAPGKEREWVSC
ISSSGGSTYYADSVKGRFTISRDNAKNTVYLQMNSLKPEDTAVYYCAAQK
GTPPLGCPAYYGMDYWGKGTLVTVSSGGGGSGGGSEVQLVESGGGLVQPG
GSLRLSCAASGFTLDYYGIGWFRQAPGKEREWVSCISSSGGSTYYADSVK
GRFTISRDNAKNTVYLQMNSLKPEDTAVYYCAAQKGTPPLGCPAYYGMDY
WGKGTLVTVSS
>PVEGFPMP42B5-9GS-42B5, SEQ ID NO: 514;PRT;->
EVQLVESGGGLVQPGGSLRLSCAASGFTLDYYGIGWFRQAPGKEREWVSC
ISSSGGSTYYADSVKGRFTISRDNAKNTVYLQMNSLKPEDAAVYYCAAQK
GTPPLGCPAYYGMDYWGKGTLVTVSSGGGGSGGGSEVQLVESGGGLVQPG
GSLRLSCAASGFTLDYYGIGWFRQAPGKEREWVSCISSSGGSTYYADSVK
GRFTISRDNAKNTVYLQMNSLKPEDAAVYYCAAQKGTPPLGCPAYYGMDY
WGKGTLVTVSS
>PVEGFPMP42A5-9GS-42A5, SEQ ID NO: 515;PRT;->
EVQLVESGGGLVQAGGSLRLSCAASGRTFSGVDVAWFRQAPGKEREFVAA
LAWSGIRTYYAVSVKGRFTISRGDPNDTVYLQMTSLKPEDTAVYYCATGR
ASRTSDYYTDRIYDSWGQGAQVTVSSGGGGSGGGSEVQLVESGGGLVQAG
GSLRLSCAASGRTFSGVDVAWFRQAPGKEREFVAALAWSGIRTYYAVSVK
GRFTISRGDFNDTVYLQMTSLKPEDTAVYYCATGRASRTSDYYTDRIYDS
WGQGAQVTVSS
>PVEGFPMP42A3-9GS-42A3, SEQ ID NO: 516;PRT;->
EVPMVESGGGLVQAGGSLRLSCAASGRTFSGVDVAWFRQAPGKEREFVAA
LAWSGIRTYYAVSVKGRFTISRGDPNDTVYLQMTSLKPEDTAVYYCATGR
ASRTSDYYTDRIYDSWGQGAQVTVSSGGGGSGGGSEVPMVESGGGLVQAG
GSLRLSCAASGRTFSGVDVAWFRQAPGKEREFVAALAWSGIRTYYAVSVK
GRPTISRGDPNDTVYLQMTSLKPEDTAVYYCATGRASRTSDYYTDRIYDS
WGQGAQVTVSS
>PVEGFPMP42F10-9GS-42F10, SEQ ID NO: 517;PRT;->
EVQLVESGGGLVQAGGSLRLSCAASGRTFSGVDVAWFRQATGKEREFVAA
LAWSGIRTYYAVSVKGRFTISRGDPNDTVYLQMTSLKPEDTAVYYCATGR
ASRTSDYYTDRIYDSWGQGAQVTVSSGGGGSGGGSEVQLVESGGGLVQAG
GSLRLSCAASGRTFSGVDVAWFRQATGKERBFVAALAWSGIRTYYAVSVK
GRFTISRGDPNDTVYLQMTSLKPEDTAVYYCATGRASRTSDYYTDRIYDS
WGQGAQVTVSS
>PVEGFPMP42A11-9GS-42A11, SEQ ID NO: 518;PRT;->
EVQLVESGGGLVQAGGSLRLSCAASGRTFSGVDVAWFRQAPGKEREFVAA
LAWSGIRTYYAVSVKGRFTISRGDPNDTVYLQMTSLKPEDTAVYYCATGR
ASSTSDYYTDRIYDSWGQGAQVTWSSGGGGSGGGSEVQLVESGGGLVQAG
GSLRLSCAASGRTFSGVDVAWFRQAPGKEREFVAALAWSGIRTYYAVSVK
GRFTISRGDPNDTVYLQMTSLKPEDTAVYYCATGRASSTSDYYTDRIYDS
WGQGAQVTVSS
>PVEGFPMP42C1-9GS-42C1, SEQ ID NO: 519;PRT;->
EVQLVESGGGLVQAGGSLRLSCAASGRTFSGVDVAWFRQAPGKEREFVAA
LAWSGIRTYYAVSVKGRFTISRGNPNDTVYLQMTSLKPEDTAVYYCATGR
AYRGSDYYTDRIYDSWGQCAQVTVSSGGGGSGGGSEVQLVESGGGLVQAG
GSLRLSCAASGRTFSGVDVAWFRQAPGKEREFVAALAWSGIRTYYAVSVK
GRFTISRGNPNDTVYLQMTSLKPEDTAVYYCATGRAYRGSDYYTDRIYDS
WGQGAQVTVSS
>PVEGFPMP42C12-9GS-42C12, SEQ ID NO: 520;PRT;->
EVQLVESGGGLVQPGCSLRLSCAASGRALSSYSVGWFRQAPGKEREFVTA
ISWSVPYYADSVKGRFTISRDNAKNTVYLQMNSLKPEDTAVYYCAADSLY
WRSSRMATDYDYWGQGTQVTVSSGGGGSGGGSEVQLVESGGGLVQPGGSL
RLSCAASGRALSSYSVGWFRQAPGKEREFVTAISWSVPYYADSVKGRFTI
SRDNAKNTVYLQMNSLKPEDTAVYYCAADSLYWRSSRMATDYDYWGQGTQ
VTVSS
>PVEGFPMP42H9-9GS-42H9, SEQ ID NO: 521;PRT;->
EVQLVESGGGLVQAGGALRLSCAASGRTFETYRMGWFRQAPGKEREFVAL
INWSSGTTVYADSVKGRFTISGDNAKDTVYLEMNSLKPEDTAVYYCAVGR
RWSGSYYSALAYQYWGQGTQVTVSSGGGGSGGGSEVQLVESGGGLVQAGG
ALRLSCAASGRTFETYRMGWFRQAPGKEREFVALINWSSGTTVYADSVKG
RFTISGDNAKDTVYLEMNSLKPEDTAVYYCAVGRRWSGSYYSALAYQYWG
QGTQVTVSS
>PVEGFPMP42E3-9GS-42E3, SEQ ID NO: 522;PRT;->
EVQLVESGGGLVQAGGALRLSCAASGRTFETYRMGWFRQAPGKEREFVAL
INWSSGTTIYADSVKGRFTISGDNAKDTVYLEMNSLKPEDTAVYYCAVGR
RWSGSYYSALAYQYWGQGTQVTVSSGGGGSGGGSEVQLVESGGGLVQAGG
ALRLSCAASGRTFETYRMGWFRQAPGKEREFVALINWSSGTTIYADSVKG
RFTISGDNAKDTVYLEMNSLKPEDTAVYYCAVGRRWSGSYYSALAYQYWG
QGTQVTVSS
>PVEGFPMP42C7-9GS-42C7, SEQ ID NO: 523;PRT;->
EVQLVESGGGLVQAGGALRLSCAASGRTFETYRMGWFRQAPGKEREFVAL
INWSSGTTIYADSVKGRFTISGDNAKDTVYLEMNSLKPRDTAVYYCAVGR
RWSGSYYSALAYQYWGKGTQVTVSSGGGGSGGGSEVQLVESGGGLVQAGG
ALRLSCAASGRTFETYRMGWFRQAPGKEREFVALINWSSGTTIYADSVKG
RFTISGDNAKDTVYLEMNSLKPEDTAVYYCAVGRRWSGSYYSALAYQYWG
KGTQVTVSS
>PVEGFPMP42D5-9GS-42D5, SEQ ID NO: 524;PRT;->
EVQLVESGGGLVHAGGALRLSCAASGRAFETYRMGWFRQAPGKEREFVAL
INWSSGTTVYADSVKGRFTISGDNAKDTVYLEMNSLKPEDTAVYYCAVGR
RWSGSYYSALAYQYWGQGTQVTVSSGGGGSGGGSEVQLVESGGGLVHAGG
ALRLSCAASGRAFETYRMGWFRQAPGKEREFVALINWSSGTTVYADSVKG
RFTISGDNAKDTVYLEMNSLKPEDTAVYYCAVGRRWSGSYYSALAYQYWG
QGTQVTVSS
>PVEGFPMP42D7-9GS-42D7, SEQ ID NO: 525;PRT;->
EVQLVESGGGLVQAGGALRPSCAASGRTFETYRMGWFRQAPGKEREFVAL
INWSSGTTVYADSVKGRFTISGDNAKDTVYLEMNSLKPEDTAVYYCAVGR
RWSGSYYSALAYQYWOQGTQVTVSSGGGGSGGGSEVQLVESGGGLVQAGG
ALRPSCAASGRTFETYRMGWFRQAPGKEREFVALINWSSGTTVYADSVKG
RFTISGDNAKDTVYLEMNSLKPEDTAVYYCAVGRRWSGSYYSALAYQYWG
QGTQVTVSS
>PVEGFPMP42C10-9GS-42C10, SEQ ID NO: 526;PRT;->
EVQLVESGGGLVQAGGALRLSCAVSGRTFESYRMGWFRQAPGKEREFVSL
INWSSGKTIYADSVKGRFTISGDNAKDTVYLEMNSLKPEDTAVYYCAVGR
AWSGSYYSALAYQYWGQGTQVTVSSGGGGSGGGSEVQLVESGGGLVQAGG
ALRLSCAVSGRTFESYRMGWFRQAPGKEREFVSLINWSSGKTIYADSVKG
RFTISGDNAKDTVYLEMNSLKPEDTAVYYCAVGRAWSGSYYSALAYQYWG
QGTQVTVSS
>PVEGFPMP42D10-9GS-42D10, SEQ ID NO: 527;PRT;->
EVQLVESGGGLVQAGGALRLSCAASGRTFETYRMGWFRQAPGKEREFVAL
INWSSGITVYLDSVKGRFTISGDNAKDTVYLEMNSLKPEDTAVYYCAVGR
AWSGSYYSALAYQYWGQGTQVTVSSGGGGSGGGSEVQLVESGGGLVQAGG
ALRLSCAASGRTFETYRMGWFRQAPGKEREFVALINWSSGITVYLDSVKG
RFTISGDNAKDTVYLEMNSLKPEDTAVYYCAVGRAWSGSYYSALAYQYWG
QGTQVTVSS
>PVEGFPMP42E4-9GS-42E4, SEQ ID NO: 528;PRT;->
EVQLMESGGGLVQAGGSLRLSCAVSGRTFESYRMGWFRQAPGKEREFVSL
INWSSGKTIYADSVKGRFTISGDNAKDTVYLEMNSLKPEDTAVYYCAVGR
AWSGSYYSALAYQYWGQGTQVTVSSGGGGSGGGSEVQLMESGGGLVQAGG
SLRLSCAVSGRTFESYRMGWFRQAPGKEREFVSLINWSSGKTIYADSVKG
RFTISGDNAKDTVYLEMNSLKPEDTAVYYCAVGRAWSGSYYSALAYQYWG
QGTQVTVSS
>PVEGFPMP42B4-9GS-42B4, SEQ ID NO: 529;PRT;->
EVQLVESGGGSVQAGGALRLSCAVSGRTFESYRMGWFRQAPGKEREFVSL
INWSSGKTIYADSVKGRPTISGDNAKDTVYLEMNSLKPEDTAVYYCAVGR
AWSGSHYSALAYQYWGQGTQVTVSSGGGGSGGGSEVQLVESGGGSVQAGG
ALRLSCAVSGRTFESYRMGWFRQAPGKEREFVSLINWSSGKTIYADSVKG
RFTISGDNAKDTVYLEMNSLKPEDTAVYYCAVGRAWSGSHYSALAYQYWG
QGTQVTVSS
>PVEGFPMP42B11-9GS-42B11, SEQ ID NO: 530;PRT;>
EVQLVESGGGLVQTGGSLRLSCAASGRTFGTYAMAWFRQSPKNEREFVAT
LRWSDGSTYYADSVKGRFTIAGDNAKNTVYLQMNNLKPEDTAVYYCAADR
WFSYTTYDATDTWHYWGQGTQVTVSSGGGGSGGGSEVQLVESGGGLVQTG
GSLRLSCAASGRTFGTYAMAWFRQSPKNEREFVATLRWSDGSTYYADSVK
GRFTIAGDNAKNTVYLQMNNLKPEDTAVYYCAADRWFSYTTYDATDTWHY
WGQGTQVTVSS

TABLE B-4
Bivalent Nanobodies against VEGF

<VEGF PMP1H9-30GS-1H9, SEQ ID NO: 531;PRT;->
EVQLVESGGGLVQAGGSLRLSCAASGRTFSSLAMGWFRQAPGKDREFVVV
VSGSGGTTKYADSVKGRFTISRDNNKNAVYLQMNSLKPEDTAVYYCAADP
SRYFITTDRRGYDYWGQGTQVTVSSGGGGSGGGGSGGGGSGGGGSGGGGS
GGGGSEVQLVESGGGLVQAGGSLRLSCAASGRTFSSLAMGWFRQAPGKDR
EFVVVVSGSGGTTKYADSVKGRFTISRDNKKNAVYLQMNSLKPEDTAVYY
CAADPSRYFITTDRRGYDYWGQGTQVTVSS
<VEGF PMP19C6-30GS-19C6, SEQ ID NO: 532;PRT;->
KVQLVESGGGLVQAGGSLRLSCAASGRSFSDNVMGWFRQAAGKEREFVAH
ISRGGSRTEYADSVKGRFTISRDNAKKTVYLQMNSLKPEDTAVYYCAASR
GVALATARPYDYWGQGTQVTVSSGGGGSGGGGSGGGGSGGGGSGGGGSGG
GGSKVQLVESGGGLVQAGGSLRLSCAASGRSFSDNVNGWFRQAAGKEREF
VAHISRGGSRTEYADSVKGRFTISRDNAKKTVYLQMNSLKPEDTAVYYCA
ASRGVALATARPYDYWGQGTQVTVSS
<VEGF PMP1D1-30GS-1D1, SEQ ID NO: 533;PRT;->
EVQLVESGGGLVQVGGSLRLSCAASGRTFSSARMGWFRQCPGKEREFVAA
ISWSNDITYYEDSVKGRFTISRDNAKATVYLQMNSLKLEDTAVYYCAASW
RSSIWIPAESDSYDFWAQGTQVTVSSGGGGSGGGGSGGGGSGGGGSGGGG
SGGGGSEVQLVESGGGLVQVGGSLRLSCAASGRTFSSARMGWFRQCPGKE
REFVAAISWSNDITYYEDSVKGRFTISRDNAKATVYLQMNSLKLEDTAVY
YCAASWRSSIWIPAESDSYDFWAQGTQVTVSS
<VEGF PMP1D10-30GS-1D10, SEQ ID NO: 534;PRT;->
EVQLVESGGGLVQPGGSLRLACAVSGFTMSSSWMYWVRQAPGKGLEWVSS
ISPGGLFPYYVDSVKGRFSISTDNANNILYLQMNSLKPEDTALYSCAKGG
APNYTPRGRGTQVTVSSGGGGSGGGGSGGGGSGGGGSGGGGSGGGGSEVQ
LVESGGGLVQPGGSLRLACAVSGFTMSSSWMYWVRQAPGKGLENVSSISP
GGLFPYYVDSVKGRVSISTDNANNILYLQMNSLKPEDTALYSCAKGGAPN
YTFRGRGTQVTVSS
<VEGF PMP25H1-30GS-25H1, SEQ ID NO: 535;PRT;->
EVQLVESGGGLVQPGGSLRLSCAASGFTFSSYSMIWVRQAPGKGLEWVSE
ISSGGGWTSYADSVKGRFTISRDNAKNTLYLQMNSLKPEDTAVYYCVQSH
RTPRSQGTQVTVSSGGGGSGGGGSGGGGSGGGGSGGGGSGGGGSEVQLVE
SGGGLVQPGGSLRLSCAASGFTFSSYSMIWVRQAPGKGLEWVSEISSGGG
WTSYADSVKGRFTISRDNAKNTLYLQMNSLKPEDTAVYYCVQSHRTPRSQ
GTQVTVSS
<VEGF PMP1F7-30GS-1F7, SEQ ID NO: 536;PRT;->
EVQLVESGGGLVQPGGSLRLSCAASGFTFSNYWMYWLRQAPGKGLESVSS
INTGGARTFYADSVKGRFTISRDNAKNTLYLQMNSLKSEDTAVYYCAKDA
AGRTRGQGTQVTVSSGGGGSGGGGSGGGGSGGGGSGGGGSGGGGSEVQLV
ESGGGLVQPGGSLRLSCAASGFTFSNYWMYWLRQAPGKGLESVSSINTGG
ARTFYADSVKGRFTISRDNAKNTLYLQMNSLKSEDTAVYYCAKDAAGRTR
GQGTQVTVSS
<VEGF PMP25G2-30GS-25G2, SEQ ID NO: 537;PRT;->
EVQLVESGGDLVQPGGSLRLSCAASGFTFSRYEMSWVRQAPGKGLEWVSG
ISTGGGWRTYADSVKGRFTISRDNAKNTLYLQMNSLKPEDTAVYYCLNRD
YGTSWADFPSWGQGTQVTVSSGGGGSGGGGSGGGGSGGGGSGGGGSGGGG
SEVQLVESGGDLVQPGGSLRLSCAASGFTFSRYEMSWVRQAPGKGLEWVS
GISTGGGWRTYADSVKGRFTISRDNAKNTLYLQMNSLKPEDTAVYYCLNR
DYGTSWADFPSWGQGTQVTVSS
<VEGF PMP1H10-30GS-1H10, SEQ ID NO: 538;PRT;->
EVQLVESGGGLVQFGGSLRLSCAASGFTVSSYTMYWARQAPGKELEWVSI
IFTNGEGTYYSDSVKGRFTVSRDNAKNTLYLQMNSLKPEDTALYYCARDP
FGRLKGQGTQVTVSSGGGGSGGGGSGGGGSGGGGSGGGGSGGGGSEVQLV
ESGGGLVQPGGSLRLSCAASGFTVSSYTMYWARQAPGKELEWVSIIFTNG
EGTYYSDSVKGRFTVSRDNAKNTLYLQMNSLKPEDTALYYCARDFFGKLK
GQGTQVTVSS
<VEGF PMP1D2-30GS-1D2, SEQ ID NO: 539;PRT;->
EVQLVESGGGLVQAGSSLRLSCVASGRSVSTYGMAWFRQAPGKEREFVAI
NRSTGTIYYADSVKGRFTISRDNAKNTLYLQMNSLKPGDTALYYCAADVF
FSGAHRYEASQWHYWGQGTQVTVSSGGGGSGGGGSGGGGSGGGGSGGGGS
GGGGSEVQLVESGGGLVQAGSSLRLSCVASGRSVSTYGMAWFRQAFGKER
EFVAINRSTGTIYYADSVKGRFTISRDNAKNTLYLQMNSLKPGDTALYYC
AADVFFSGAHRYEASQWHYWGQGTQVTVSS
<VEGF PMP12E3-30GS-12E3, SEQ ID NO: 540;PRT;->
EVQLVESGGGLVQPGGSLRLSCAASVRTFSNYFMGWFRQAPGKEREFVAT
IGWSGTDYADSVKGRFTISRDNAKNTVYLQMNSLKPEDTAVYYCAAGYFK
RLGPTSPRDYTYWGQGTQVTVSSGGGGSGGGGSGGGGSGGGGSGGGGSGG
GGSEVQLVESGGGLVQPGGSLRLSCAASVRTFSNYFMGWPRQAPGKEREF
VATIGWSGTDYADSVKGRFTISRDNAKNTVYLQMNSLKPEDTAVYYCAAG
YFKRLGPTSPRDYTYWGQGTQVTVSS
<VEGF PMP7D7-30GS-7D7, SEQ ID NO: 541;PRT;>
EVQLVESGGGLVQAGGSLRLSCVASGRTFGSYDMGWFRQAPGKEREFVAA
ISTGGGWRRYADSVKGRFTISRDNGKNTMYLQMNSLKPEDTAVYYCAQGW
SLAEFRSWGQGTQVTVSSGGGGSGGGGSGGGGSGGGGSGGGGSGGGGSEV
QLVESGGGLVQAGGSLRLSCVASGRTFGSYDMGWFRQAPGKEREFVAAIS
TGGGWRRYADSVKGRFTISRDNGKNTMYLQMNSLKPEDTAVYYCAQGWSL
AEFRSWGQGTQVTVSS
<VEGF PMP8F7-30GS-8F7, SEQ ID NO: 542;PRT;->
EVQLVESGGGLVQAGGSLRLSCAASARTFSSYAMSWFRQAPGKERDFVAV
INWSGGSTYYADSVKGRFTISRDNAKNTVYLEMNSLKPEDTAVYYCASTA
FRRRTYYTPESWDYWGQGTQVTVSSGGGGSGGGGSGGGGSGGGGSGGGGS
GGGGSEVQLVESGGGLVQAGGSLRLSCAASARTFSSYAMSWFRQAPGKER
DFVAVINWSGGSTYYADSVKGRFTISRDNAKNTVYLEMNSLKPEDTAVYY
CASTAFRRRTYYTPESWDYWGQGTQVTVSS
<VEGF PMP7G6-30GS-7G6, SEQ ID NO: 543;PRT;->
EVQLVESGGGLVQAGDSLRLSCAASGLTFSAYTMGWFRQAPGKEREFVSA
TSRSGGATLYTDSVKGRFTISRDNAKNTVDLQMNNLKPGDTAVYYCAAKS
RPGYGGTLDYDYWGQGTQVTVSSGGGGSGGGGSGGGGSGGGGSGGGGSGG
GGSEVQLVESGGGLVQAGDSLRLSCAASGLTFSAYTMGWFRQAPGKEREF
VSATSRSGGATLYTDSVKGRFTISRDNAKNTVDLQMNNLKPGDTAVYYCA
AKSRPGYGGTLDYDYWGQGTQVTVSS
<VEGF PMP25B1-30GS-25B1, SEQ ID NO: 544;PRT;>
EVQLVESGGGLVQSGGSLRLSCAASGLAFSTYAMGWFRQAPGKDREMVIA
LNWSGDRTWYLNSVKGRFTISRDNAKNTVSLQMNSLKPEDTAVYYCAAKA
SGTIRGGSYYDSAGYSHWGQGTQVTVSSGGGGSGGGGSGGGGSGGGGSGG
GGSGGGGSEVQLVESGGGLVQSGGSLRLSCAASGLAFSTYAMGWFRQAPG
KDREMVIALNWSGDRTWYLNSVKGRPTISRDNAKNTVSLQMNSLKPEDTA
VYYCAAKASGTIRGGSYYDSAGYSHWGQGTQVTVSS
<VEGF PMP25E1-30GS-25E1, SEQ ID NO: 545;PRT;>
EVQLVESGGGLVQAGVSLRLSCAASGRTFGNYNMGWFRQAQGKDRELVAA
IRWSEDRVWYLGSVRGRFTISRDNAKNTVYLQMNSLKPEDTAAYYCAAQD
RRRGDYYTPDYHYWGQGTQVTVSSGGGGSGGGGSGGGGSGGGGSGGGGSG
GGGSEVQLVESGGGLVQAGVSLRLSCAASGRTFGNYNMGWFRQAQGKDRE
LVAAIRWSEDRVWYLGSVRGRFTISRDNAKNTVYLQMNSLKPEDTAAYYC
AAQDRRRGDYYTPDYHYWGQGTQVTVSS
<VEGF PMP25D1-30GS-25D1, SEQ ID NO: 546;PRT;->
EVQLVESGGRLVQAGGSLRLSCAASGGIFSRYNMGWFRQAPGKEREFVAA
AHWSGGRMWYKDSVKGRFTMSRDNNKNTVYLQMNSLKSEDTAVYYCAADS
GAWGGSYYRAEEYVYWGQGTQVTVSSGGGGSGGGGSGGGGSGGGGSGGGG
SGGGGSEVQLVESGGRLVQAGGSLRLSCAASGGIFSRYNMGWFRQAPGKE
REPVAAAHWSGGRMWYKDSVKGRFTMSRDNNKNTVYLQMNSLKSEDTAVY
YCAADSGAWGGSYYRAEEYVYWGQGTQVTVSS
<VEGF PMP25C1-30GS-25C1, SEQ ID NO: 547;PRT;->
EVQLVESGGGLVQAGASLRLSCAASGRTFSSYDMGWFRQAPGKERALVAA
ITSSGGRRWYADSVLGRFTISRDNAKNTVSLQMSSLRPEDTAVYYCAARG
RVDYNYYNKDAYTYWGQGTQVTVSSGGGGSGGGGSGGGGSGGGGSGGGGS
GGGGSEVQLVESGGGLVQAGASLRLSCAASGRTFSSYDMGWFRQAPGKER
ALVAAITSSGGRRWYADSVLGRFTISRDNAKNTVSLQMSSLRPEDTAVYY
CAARGRVDYNYYNKDAYTYWGQGTQVTVSS
<VEGF PMP25D3-30GS-25D3, SEQ ID NO: 548;PRT;->
EVQLVESGGRLVQAGDSLRLSCAASGGTVRNYAMGWFRQAPGQEREILSS
ITRTDNITYYEDSVKGRFTIVRDTAKNTVYLQMNSLKPEDTAVYYCAAAM
THFAVLERFYGYWGQGTQVTVSSGGGGSGGGGSGGGGSGGGGSGGGGSGG
GGSEVQLVESGGRLVQAGDSLRLSCAASGGTVRNYAMGWFRQAPGQEREI
LSSITRTDNITYYEDSVKGRFTIVRDTAKNTVYLQMNSLKPEDTAVYYCA
AAMTHFAVLEREYGYWGQGTQVTVSS
<VEGF PMP14G5-30GS-14G5, SEQ ID NO: 549;PRT;->
EVQLVESGGGLVQAGGSLRLSCAASGRTISSYTMGWFRQAPGKEREFVAA
GTWSTSVTEYADSVKGRFTISRDTAKNTLYLQMNSLKPEDTAVYYCAAEP
YIPVRTMRHMTFLTYWGQGTQVTVSSGGGGSGGGGSGGGGSGGGGSGGGG
SGGGGSEVQLVESGGGLVQAGGSLRLSCAASGRTISSYTMGWFRQAFGKE
REFVAAGTWSTSVTEYADSVKGRFTISRDTAKNTLYLQMMSLKPEDTAVY
YCAAEPYIPVRTMRHMTFLTYWGQGTQVTVSS
<VEGF PMP1C4-30GS-1C4, SEQ ID NO: 550;PRT;->
EVQLVESGGGLVQAGGSLRLSCAPSGRDISSYIMGWFRQAPGKEREFTAD
INWNGSWREYAESVNGRFTISRDNAKNTVYLQMNSLKPEDTAVYYCAAKE
RGSGAYDYWGQGTQVTVSSGGGGSGGGGSGGGGSGGGGSGGGGSGGGGSE
VQLVESGGGLVQAGGSLRLSCAPSGRDISSYIMGWFRQAFGKEREFTADI
NWNGSWRFYAESVNGRFTISRDNAKNTVYLQMNSLKPEDTAVYYCAAKER
GSGAYDYWGQGTQVTVSS
>PVEGFPMP42B1-30GS-42B10, SEQ ID NO: 551;PRT;->
EVQLVESGGGLVQAGGSLRLSCTASGRALDTYTVTWFRQTPGKEREFVAS
NRWNAKPYTTDSVKGRFTISRDNAKNTVYLQMNSLKPEDTAVYYCAADLT
TWADGPYRYWGQGTQVTVSSGGGGSGGGGSGGGGSGGGGSGGGGSGGGGS
EVQLVESGGGLVQAGGSLRLSCTASGRALDTYTVTWFRQTPGKEREFVAS
NRWNAKPYTTDSVKGRFTISRDNAKNTVYLQMNSLKPEDTAVYYCAADLT
TWADGPYRYWGQGTQVTVSS
>PVEGFPMP42C5-30GS-42C5, SEQ ID NO: 552;PRT;->
KVQLVESGGGLVQAGGSLRLSCAASGRALDTYTVTWFRQTPGKEREFVAS
IRWNAKPYTTDSVKGRFTISRDNAKNTVYLQMNSLKPEDTAIYYCAADLT
TWADGFYRYWGQGTQVTVSSGGGGSGGGGSGGGGSGGGGSGGGGSGGGGS
KVQLVESGGGLVQAGGSLRLSCAASGRALDTYTVTWFRQTPGKEREFVAS
IRWNAKPYTTDSVKGRFTISRDNAKNTVYLQMNSLKPEDTAIYYCAADLT
TWADGPYRYWGQGTQVTVSS
>PVEGFPMP42H5-30GS-42H5, SEQ ID NO: 553;PRT;->
EVQLVESGGGLVQAGGSLRLSCTASGRALDTYTVTWFRQTPGKEREFVAS
NRWMAKPYVTDSVKGRFTISRDNAKNTVYLQMNSLKPEDTAVYYCAADLT
TWADGPYRYWGQGTQVTVSSGGGGSGGGGSGGGGSGGGGSGGGGSGGGGS
EVQLVESGGGLVQAGGSLRLSCTASGRALDTYTVTWFRQTPGKEREFVAS
NRWNAKPYVTDSVKGRFTISRDNAKNTVYLQMNSLKPEDTAVYYCAADLT
TWADGPYRYWGQGTQVTVSS
>PVEGFPMP42E12-30GS-42E12, SEQ ID NO: 554;PRT;->
EVQLVESGGGLVQAGGSLRLSCAASGRALDTYTVTWFRQTPGKEREFVAS
DRWNAKPYTTDSVKGRFTISRDNAKNTVYLQMNSLKPEDTAVYYCAADLT
TWADGPYRFWGQGTQVTVSSGGGGSGGGGSGGGGSGGGGSGGGGSGGGGS
EVQLVESGGGLVQAGGSLRLSCAASGRALDTYTVTWFRQTPGKEREPVAS
DRWNAKPYTTDSVKGRFTISRDNAKNTVYLQMNSLKPEDTAVYYCAADLT
TWADGPYRFWGQGTQVTVSS
>PVEGFPMP42E2-30GS-42E2, SEQ ID NO: 555;PRT;->
EVQLVESGGGLVQAGGSLRLSCAASGRALDTYTVTWFRQTPGKGREFLAS
IRWNAKPYTTDSVKGRFTMSRDNAKNTVYLQMNSLRPEDTAVYYCAADPT
TWADGPYRYWGQGTQVTVSSGGGGSGGGGSGGGGSGGGGSGGGGSGGGGS
EVQLVESGGGLVQAGGSLRLSCAASGRALDTYTVTWFRQTPGKGREFLAS
IRWNAKPYTTDSVKGRFTMSRDNAKNTVYLQMNSLRPEDTAVYYCAADPT
TWADGPYRYWGQGTQVTVSS
>PVEGFPMP42F1-30GS-42F1, SEQ ID NO: 556;PRT;->
EVQLVESGGGLVQPGGSLRLSCAASGRALDTYTVTWFRQTPGKTREFVAS
VRWNAKPYTTDSVKGRPTISRDNAKNTVYLQMNSLKPEDTAVYYCAADPT
TWADGPYRYWGQGTQVTVSSGGGGSGGGGSGGGGSGGGGSGGGGSGGGGS
EVQLVESGGGLVQPGGSLRLSCAASGRALDTYTVTWFRQTPGKTREFVAS
VRWNAKPYTTDSVKGRFTISRDNAKNTVYLQMNSLKPEDTAVYYCAADPT
TWADGPYRYWGQGTQVTVSS
>PVEGFPMP42G5-30GS-42G5, SEQ ID NO: 557;PRT;>
EVHLVESGGGLVQAGGSLRLSCAASGRALDTYTVTWFRQTPGKTREFVAS
VRWNAKPYTTDSVKGRFTISRDNAKNTVYLQMNSLKPEDTAVYYCAADPT
TWADGPYRYWGQGTQVTVSSGGGGSGGGGSGGGGSGGGGSGGGGSGGGGS
EVHLVESGGGLVQAGGSLRLSCAASGRALDTYTVTWFRQTPGKTREFVAS
VRWNAKPYTTDSVKGRFTISRDNAKNTVYLQMNSLKPEDTAVYYCAADPT
TWADGPYRYWGQGTQVTVSS
>PVEGFPMP42A9-30GS-42A9, SEQ ID NO: 558;PRT;->
EVQLVESGGGLVQPGGSLRLSCAASGFTLDYYGIGWFRQAPGKEREWVSC
ISSSGGSTYYADSVKGRFTISRDNAKNTVYLQMNSLKPEDTAVYYCAAQK
GTPPLGCFAYYGMDYWGKGTLVTVSSGGGGSGGGGSGGGGSGGGGSGGGG
SGGGGSEVQLVESGGGLVQPGGSLRLSCAASGFTLDYYGIGWFRQAPGKE
REWVSCISSSGGSTYYADSVKGRFTISRDNAKNTVYLQMNSLKPEDTAVY
YCAAQKGTPPLGCPAYYGMDYWGKGTLVTVSS
>PVEGFPMP42B5-30GS-42B5, SEQ ID NO: 559;PRT;->
EVQLVESGGGLVQPGGSLRLSCAASGFTLDYYGIGWFRQAPGKEREWVSC
ISSSGGSTYYADSVKGRFTISRDNAKNTVYLQMNSLKPEDAAVYYCAAQK
GTPPLGCPAYYGMDYWGKGTLVTVSSGGGGSGGGGSGGGGSGGGGSGGGG
SGGGGSEVQLVESGGGLVQPGGSLRLSCAASGFTLDYYGIGWFRQAPGKE
REWVSCISSSGGSTYYADSVKGRFTISRDNAKNTVYLQMNSLKPEDAAVY
YCAAQKGTPPLGCPAYYGMDYWGKGTLVTVSS
>PVEGFPMP42A5-30GS-42A5, SEQ ID NO: 560;PRT;->
EVQLVESGGGLVQAGGSLRLSCAASGRTFSGVDVAWFRQAPGKEREFVAA
LAWSGIRTYYAVSVKGRFTISRGDPNDTVYLQMTSLKPEDTAVYYCATGR
ASRTSDYYTDRIYDSWGQGAQVTVSSGGGGSGGGGSGGGGSGGGGSGGGG
SGGGGSEVQLVESGGGLVQAGGSLRLSCAASGRTFSGVDVAWFRQAPGKE
REFVAALAWSGIRTYYAVSVKGRFTISRGDPNDTVYLQMTSLKPEDTAVY
YCATGRASRTSDYYTDRIYDSWGQGAQVTVSS
>PVEGFPMP42A3-30GS-42A3, SEQ ID NO: 561;PRT;->
EVPMVESGGGLVQAGGSLRLSCAASGRTFSGVDVAWFRQAPGKEREFVAA
LAWSGIRTYYAVSVKGRFTISRGDPNDTVYLQMTSLKPEDTAVYYCATGR
ASRTSDYYTDRIYDSWGQGAQVTVSSGGGGSGGGGSGGGGSGGGGSGGGG
SGGGGSEVPMVESGGGLVQAGGSLRLSCAASGRTFSGVDVAWFRQAPGKE
REFVAALAWSGIRTYYAVSVKGRFTISRGDPNDTVYLQMTSLKPEDTAVY
YCATGRASRTSDYYTDRIYDSWGQGAQVTVSS
>PVEGFPMP42F10-30GS-42F10, SEQ ID NO: 562;PRT;->
EVQLVESGGGLVQAGGSLRLSCAASGRTFSGVDVAWFRQATGKEREFVAA
LAWSGIRTYYAVSVKGRFTISRGDPNDTVYLQMTSLKPEDTAVYYCATGR
ASRTSDYYTDRIYDSWGQGAQVTVSSGGGGSGGGGSGGGGSGGGGSGGGG
SGGGGSEVQLVESGGGLVQAGGSLRLSCAASGRTFSGVDVAWERQATGKE
RREVAALAWSGIRTYYAVSVKGRFTISRGDPNDTVYLQMTSLKPEDTAVY
YCATGRASRTSDYYTDRIYDSWGQGAQVTVSS
>PVEGFPMP42A11-30GS-42A11, SEQ ID NO: 563;PRT;->
EVQLVESGGGLVQAGGSLRLSCAASGRTFSGVDVAWFRQAPGKEREFVAA
LAWSGIRTYYAVSVKGRFTISRGDPNDTVYLQMTSLKPEDTAVYYCATGR
ASSTSDYYTDRIYDSWGQGAQVTVSSGGGGSGGGGSGGGGSGGGGSGGGG
SGGGGSEVQLVESGGGLVQAGGSLRLSCAASGRTFSGVDVAWFRQAPGKE
REFVAALAWSGIRTYYAVSVKGRFTISRGDPNDTVYLQMTSLKPEDTAVY
YCATGRASSTSDYYTDRIYDSWGQGAQVTVSS
>PVEGFPMP42C1-30GS-42C1, SEQ ID NO: 564;PRT;->
EVQLVESGGGLVQAGGSLRLSCAASGRTFSGVDVAWFRQAPGKEREFVAA
LAWSGIRTYYAVSVKGRFTISRGNPNDTVYLQMTSLKPEDTAVYYCATGR
AYRGSDYYTDRIYDSWGQGAQVTVSSGGGGSGGGGSGGGGSGGGGSGGGG
SGGGGSEVQLVESGGGLVQAGGSLRLSCAASGRTFSGVDVAWFRQAPGKE
REFVAALAWSGIRTYYAVSVKGRFTISRGNPNDTVYLQMTSLKPEDTAVY
YCATGRAYRGSDYYTDRIYDSWGQGAQVTVSS
>PVEGFFMP42C12-30GS-42C12, SEQ ID NO: 565;PRT;->
EVQLVESGGGLVQPGGSLRLSCAASGRALSSYSVGWFRQAPGKEREFVTA
ISWSVPYYADSVKGRFTISRDNAKNTVYLQMNSLKPEDTAVYYCAADSLY
WRSSRMATDYDYWGQGTQVTVSSGGGGSGGGGSGGGGSGGGGSGGGGSGG
GGSEVQLVESGGGLVQPGGSLRLSCAASGRALSSYSVGWFRQAPGKEREF
VTAISWSVPYYADSVKGRFTISRDNAKNTVYLQMNSLKPEDTAVYYCAAD
SLYWRSSRMATDYDYWGQGTQVTVSS
>PVEGFPMP42H9-30GS-42H9, SEQ ID NO: 566;PRT;->
EVQLVESGGGLVQAGGALRLSCAASGRTFETYRMGWFRQAPGKEREFVAL
INWSSGTTVYADSVRGRFTISGDNAKDTVYLEMNSLKPEDTAVYYCAVGR
RWSGSYYSALAYQYWGQGTQVTVSSGGGGSGGGGSGGGGSGGGGSGGGGS
GGGGSEVQLVESGGGLVQAGGALRLSCAASGRTFETYRMGWFRQAPGKER
EFVALINWSSGTTVYADSVKGRFTISGDNAKDTVYLEMNSLKPEDTAVYY
CAVGRRWSGSYYSALAYQYWGQGTQVTVSS
>PVEGFPMP42E3-30GS-42E3, SEQ ID NO: 567;PRT;->
EVQLVESGGGLVQAGGALRLSCAASGRTFETYRMGWFRQAPGKEREFVAL
INWSSGTTIYADSVKGRFTISGDNAKDTVYLEMNSLKPEDTAVYYCAVGR
RWSGSYYSALAYQYWGQGTQVTVSSGGGGSGGGGSGGGGSGGGGSGGGGS
GGGGSEVQLVESGGGLVQAGGALRLSCAASGRTFETYRMGWFRQAPGKER
EFVALINWSSGTTIYADSVKGRFTISGDNAKDTVYLEMNSLKPEDTAVYY
CAVGRRWSGSYYSALAYQYWGQGTQVTVSS
>PVEGFPMP42C7-30GS-42C7, SEQ ID NO: 568;PRT;->
EVQLVESGGGLVQAGGALRLSCAASGRTFETYRMGWFRQAPGKEREFVAL
INWSSGTTIYADSVKGRFTISGDNAKDTVYLEMNSLKPEDTAVYYCAVGR
RWSGSYYSALAYQYWGKGTQVTVSSGGGGSGGGGSGGGGSGGGGSGGGGS
GGGGSEVQLVESGGGLVQAGGALRLSCAASGRTFETYRMGWFRQAPGKER
EFVALINWSSGTTIYADSVKGRFTISGDNAKDTVYLEMNSLKPEDTAVYY
CAVGRRWSGSYYSALAYQYWGKGTQVTVSS
>PVEGFPMP42D5-30GS-42D5, SEQ ID NO: 569;PRT;->
EVQLVESGGGLVHAGGALRLSCAASGRAFETYRMGWFRQAPGKEREFVAL
INWSSGTTVYADSVKGRFTISGDNAKDTVYLEMNSLKPEDTAVYYCAVGR
RWSGSYYSALAYQYWGQOTQVTVSSGGGGSGGGGSGGGGSGGGGSGGGGS
GGGGSEVQLVESGGGLVHAGGALRLSCAASGRAFETYRMGWFRQAPGKER
EFVALINWSSGTTVYADSVKGRFTISGDNAKDTVYLEMNSLKPEDTAVYY
CAVGRRWSGSYYSALAYQYWGQGTQVTVSS
>PVEGFPMP42D7-30GS-42D7, SEQ ID NO: 570;PRT;->
4EVQLVESGGGLVQAGGALRPSCAASGRTFETYRMGWFRQAPGKEREFVA
LINWSSGTTVYADSVKGRFTISGDNAKDTVYLEMNSLKPEDTAVYYCAVG
RRWSGSYYSALAYQYWGQGTQVTVSSGGGGSGGGGSGGGGSGOGGSGGGG
SGGGGSEVQLVESGGGLVQAGGALRPSCAASGRTFETYRMGWFRQAPGKE
REFVALINWSSGTTVYADSVKGRFTISGDNAKDTVYLEMNSLKPEDTAVY
YCAVGRRWSGSYYSALAYQYWGQGTQVTVSS
>PVEGFPMP42C10-3005-42C10, SEQ ID NO: 571;PRT;->
EVQLVESGGGLVQAGGALRLSCAVSGRTFESYRMGWFRQAPGKEREFVSL
INWSSGKTIYADSVKGRFTISGDNAKDTVYLEMNSLKPEDTAVYYCAVGR
AWSGSYYSALAYQYWGQGTQVTVSSGGGGSGGGGSGGGGSGGGGSGGGGS
GGGGSEVQLVESGGGLVQAGGALRLSCAVSGRTFESYRMGWFRQAPGKER
EFVSLINWSSGRTIYADSVKGRFTISGDNAKDTVYLEMNSLKPEDTAVYY
CAVGRAWSGSYYSALAYQYWGQGTQVTVSS
>PVEGFPMP42D10-30GS-42D10, SEQ ID NO: 572;PRT;->
EVQLVESGGGLVQAGGALRLSCAASGRTFETYRMGWFRQAPGKEREFVAL
INWSSGITVYLDSVKGRFTISGDNAKDTVYLEMNSLKPEDTAVYYCAVGR
AWSGSYYSALAYQYWGQGTQVTVSSGGGGSGGGGSGGGGSGGGGSGGGGS
GGGGSEVQLVESGGGLVQAGGALRLSCAASGRTFETYRMGWFRQAPGKER
EFVALINWSSGITVYLDSVKGRFTISGDNAKDTVYLEMNSLKPEDTAVYY
CAVGRAWSGSYYSALAYQYWGQGTQVTVSS
>PVEGFPMP42E4-30GS-42E4, SEQ ID NO: 573;PRT;->
EVQLMESGGGLVQAGGSLRLSCAVSGRTFESYRMGWFRQAPGKEREFVSL
INWSSGKTIYADSVKGRFTISGDNAKDTVYLEMNSLKPEDTAVYYCAVGR
AWSGSYYSALAYQYWGQGTQVTVSSGGGGSGGGGSGGGGSGGGGSGGGGS
GGGGSEVQLMESGGGLVQAGGSLRLSCAVSGRTFESYRMGWFRQAPGKER
EFVSLINWSSGKTIYADSVKGRFTISGDNAKDTVYLEMNSLKPEDTAVYY
CAVGRAWSGSYYSALAYQYWGQGTQVTVSS
>PVEGFPMP42B4-30GS-42B4, SEQ ID NO: 574;PRT;->
EVQLVESGGGSVQAGGALRLSCAVSGRTFESYRMGWFRQAPGKEREFVSL
INWSSGKTIYADSVKGRFTISGDNAKDTVYLEMNSLKPEDTAVYYCAVGR
AWSGSHYSALAYQYWGQGTQVTVSSGGGGSGGGGSGGGGSGGGGSGGGGS
GGGGSEVQLVESGGGSVQAGGALRLSCAVSGRTFESYRMGWFRQAPGKER
EFVSLINWSSGKTIYADSVKGRFTISGDNAKDTVYLEMNSLKPEDTAVYY
CAVGRAWSGSHYSALAYQYWGQGTQVTVSS
>PVEGFPMP42B11-30GS-42B11, SEQ ID NO: 575;PRT;->
EVQLVESGGGLVQTGGSLRLSCAASGRTFGTYAMAWFRQSPKNEREFVAT
LRWSDGSTYYADSVKGRPTLAGDNAKNTVYLQMNNLKPEDTAVYYCAADR
WFSYTTYDATDTWHYWGQGTQVTVSSGGGGSGGGGSGGGGSGGGGSGGGG
SGGGGSEVQLVESGGGLVQTGGSLRLSCAASGRTFGTYAMAWFRQSPKNE
REFVATLRWSDGSTYYADSVKGRFTIAGDNAKNTVYLQMNNLKPEDTAVY
YCAADRWFSYTTYDATDTWHYWGQCGQVTVSS

TABLE B-5
Bispecific Nanbodies against VEGF

<VEGF PMP1H9-9GS-ALB8, SEQ ID NO: 576;PRT;->
EVQLVESGGGLVQAGGSLRLSCAASGRTFSSLAMGWFRQAPGKDREFVVV
VSGSGGTTKYADSVKGRFTISRDNNKNAVYLQMNSLKPEDTAVYYCAADP
SRYFITTDRRGYDYWGQGTQVTVSSGGGGSGGGSEVQLVESGGGLVQPGN
SLRLSCAASGFTFSSFGMSWVRQAPGKGLEWVSSISGSGSDTLYADSVKG
RFTISRDNAKTTLYLQMNSLRPEDTAVYYCTIGGSLSRSSQGTLVTVSS
<VEGF ALB8-9GS-PMP1H9, SEQ ID NO: 577;PRT;->
EVQLVESGGGLVQPGNSLRLSCAASGFTFSSFGMSWVRQAPGKGLEWVSS
ISGSGSDTLYADSVKGRFTISRDNAKTTLYLQMNSLRPEDTAVYYCTIGG
SLSRSSQGTLVTVSSGGGGSGGGSEVQLVESGGGLVQAGGSLRLSCAASG
RTFSSLAMGWFRQAFGKDREFVVVVSGSGGTTKYADSVKGRFTISRDNNK
NAVYLQMNSLKPEDTAVYYCAADPSRYFITTDRRGYDYWGQGTQVTVSS
<VEGF PMP19C6-9GS-ALB8, SEQ ID NO: 578;PRT;->
KVQLVESGGGLVQAGGSLRLSCAASGRSFSDNVMGWFRQAAGKEREFVAH
ISRGGSRTEYADSVKGRFTISRDNAKKTVYLQMNSLKPEDTAVYYCAASR
GVALATARPYDYWGQGTQVTVSSGGGGSGGGSEVQLVESGGGLVQPGNSL
RLSCAASGFTFSSFGMSWVRQAPGKGLEWVSSTSGSGSDTLYADSVKGRF
TISRDNAKTTLYLQMNSLRPEDTAVYYCTIGGSLSRSSQGTLVTVSS
<VEGF ALB8-9GS-PMP19C6, SEQ ID NO: 579;PRT;->
EVQLVESGGGLVQPGNSLRLSCAASGFTFSSFGMSWVRQAPGKGLEWVSS
ISGSGSDTLYADSVKGRFTISRDNAKTTLYLQMNSLRPEDTAVYYCTIGG
SLSRSSQGTLVTVSSGGGGSGGGSKVQLVESGGGLVQAGGSLRLSCAASG
RSFSDNVMGWPRQAAGKEREFVAHISRGGSRTEYADSVKGRFTISRDNAK
KTVYLQMNSLKPEDTAVYYCAASRGVALATARPYDYWGQGTQVTVSS
<VEGF PMP1D1-9GS-ALB8, SEQ ID NO: 580;PRT;->
EVQLVESGGGLVQVGGSLRLSCAASGRTFSSARMGWFRQCPGKEREFVAA
ISWSNDITYYEDSVKGRFTISRDNAKATVYLQMNSLKLEDTAVYYCAASW
RSSIWIPAESDSYDFWAQGTQVTVSSGGGGSGGGSEVQLVESGGGLVQPG
NSLRLSCAASGPTFSSFGMSWVRQAPGKGLEWVSSISGSGSDTLYADSVK
GRFTISRDNAKTTLYLQMNSLRPEDTAVYYCTIGGSLSRSSQGTLVTVSS
<VEGF ALB8-9GS-PMP1D1, SEQ ID NO: 581;PRT;->
EVQLVESGGGLVQPGNSLRLSCAASGFTFSSFGMSWVRQAPGKGLEWVSS
ISGSGSDTLYADSVKGRFTISRDNAKTTLYLQMNSLRPEDTAVYYCTIGG
SLSRSSQGTLVTVSSGGGGSGGGSEVQLVESGGGLVQVGGSLRLSCAASG
RTFSSARMGWFRQCPGKEREFVAAISWSNDITYYEDSVKGRFTISRDNAK
ATVYLQMNSLKLEDTAVYYCAASWRSSIWIPAESDSYDFWAQGTQVTVSS
<VEGF PMP1D10-9GS-ALB8, SEQ ID NO: 582;PRT;->
EVQLVESGGGLVQPGGSLRLACAVSGFTMSSSWMYWVRQAPGKGLEWVSS
ISPGGLFFYYVDSVKGRFSISTDNANNILYLQMNSLKPEDTALYSCAKGG
APNYTPRGRGTQVTVSSGGGGSGGGSEVQLVESGGGLVQPGNSLRLSCAA
SGFTFSSFGMSWVRQAPGKGLEWVSSISGSGSDTLYADSVKGRFTISRDN
AKTTLYLQMNSLRPEDTAVYYCTIGGSLSRSSQGTLVTVSS
<VEGF ALB8-9GS-PMP1D10, SEQ ID NO: 583;PRT;->
EVQLVESGGGLVQPGNSLRLSCAASGFTFSSFGMSWVRQAPGKGLEWVSS
ISGSGSDTLYADSVKGRFTISRDNAKTTLYLQMNSLRPEDTAVYYCTIGG
SLSRSSQGTLVTVSSGGGGSGGGSEVQLVESGGGLVQPGGSLRLACAVSG
FTMSSSWMYWVRQAPGKGLEWVSSISPGGLFPYYVDSVKGRFSISTDNAN
NILYLQMNSLKPEDTALYSCAKGGAPNYTPRGRGTQVTVSS
<VEGF PMP25H1-9GS-ALB8, SEQ ID NO: 584;PRT;->
EVQLVESGGGLVQPGGSLRLSCAASGFTFSSYSMIWVRQAPGKGLEWVSE
ISSGGGWTSYADSVKGRFTISRDNAKNTLYLQMNSLKPEDTAVYYCVQSH
RTPRSQGTQVTVSSGGGGSGGGSEVQLVESGGGLVQPGNSLRLSCAASGF
TFSSFGMSWVRQAPGKGLEWVSSISGSGSDTLYADSVKGRFTISRDNAKT
TLYLQMNSLRPEDTAVYYCTIGGSLSRSSQGTLVTVSS
<VEGF ALB8-9GS-PMP25H1, SEQ ID NO: 585;PRT;->
EVQLVESGGGLVQPGNSLRLSCAASGFTFSSFGMSWVRQAFGKGLEWVSS
ISGSGSDTLYADSVKGRFTISRDNAKTTLYLQMNSLRPEDTAVYYCTIGG
SLSRSSQGTLVTVSSGGGGSGGGSEVQLVESGGGLVQPGGSLRLSCAASG
FTFSSYSMIWVRQAPGKGLEWVSEISSGGGWTSYADSVKGRFTISRDNAK
NTLYLQMNSLKPEDTAVYYCVQSHRTPRSQGTQVTVSS
<VEGF PMP1F7-9GS-ALB8, SEQ ID NO: 586;PRT;->
EVQLVESGGGLVQPGGSLRLSCAASGFTFSNYWMYWLRQAPGKGLESVSS
INTGGARTFYADSVKGRFTISRDNAKNTLYLQMNSLKSEDTAVYYCAKDA
AGRTRGQGTQVTVSSGGGGSGGGSEVQLVESGGGLVQPGNSLRLSCAASG
FTFSSFGMSWVRQAPGKGLEWVSSISGSGSDTLYADSVKGRFTISRDNAK
TTLYLQMNSLRPEDTAVYYCTIGGSLSRSSQGTLVTVSS
<VEGF ALB8-9GS-PMP1F7, SEQ ID NO: 587;PRT;->
EVQLVESGGGLVQPGNSLRLSCAASGFTFSSFGMSWVRQAPGKGLEWVSS
ISGSGSDTLYADSVKGRFTISRDNAKTTLYLQMNSLRPEDTAVYYCTIGG
SLSRSSQGTLVTVSSGGGGSGGGSEVQLVESGGGLVQPGGSLRLSCAASG
FTFSNYWMYWLRQAPGKGLESVSSINTGGARTFYADSVKGRFTISRDNAK
NTLYLQMNSLKSEDTAVYYCAKDAAGRTRGQGTQVTVSS
<VEGF PMP25G2-9GS-ALB8, SEQ ID NO: 588;PRT;->
EVQLVESGGDLVQPGGSLRLSCAASGFTFSRYEMSWVRQAPGKGLEWVSG
ISTGGGWRTYADSVKGRFTISRDNAKNTLYLQMNSLKPEDTAVYYCLNRD
YGTSWADFPSWGQGTQVTVSSGGGGSGGGSEVQLVESGGGLVQPGNSLRL
SCAASGFTFSSFGMSWVRQAPGKGLEWVSSISGSGSDTLYADSVKGRFTI
SRDNAKTTLYLQMNSLRPEDTAVYYCTIGGSLSRSSQGTLVTVSS
<VEGF ALB8-9GS-PMP25G2, SEQ ID NO: 589;PRT;->
EVQLVESGGGLVQPGNSLRLSCAASGFTFSSFGMSWVRQAPGKGLEWVSS
ISGSGSDTLYADSVKGRFTISRDNAKTTLYLQMNSLRPEDTAVYYCTIGG
SLSRSSQGTLVTVSSGGGGSGGGSEVQLVESGGDLVQPGGSLRLSCAASG
FTFSRYEMSWVRQAPGKGLEWVSGISTGGGWRTYADSVKGRFTISRDNAK
NTLYLQMNSLKPEDTAVYYCLNRDYGTSWADFPSWGQGTQVTVSS
<VEGF PMP1H10-9GS-ALB8, SEQ ID NO: 590;PRT;->
EVQLVESGGGLVQPGGSLRLSCAASGFTVSSYTMYWARQAFGKELEWVSI
IFTNGEGTYYSDSVKGRFTVSRDNAKNTLYLQNNSLKPEDTALYYCARDP
FGKLKGQGTQVTVSSGGGGSGGGSEVQLVESGGGLVQPGNSLRLSCAASG
FTFSSFGMSWVRQAPGKGLEWVSSISGSGSDTLYADSVKGRFTISRDNAK
TTLYLQMNSLRPEDTAVYYCTIGGSLSRSSQGTLVTVSS
<VEGF ALB8-9GS-PMP1H10, SEQ ID NO: 591;PRT;->
EVQLVESGGGLVQPGNSLRLSCAASGFTFSSFGMSWVRQAPGKGLEWVSS
ISGSGSDTLYADSVKGRFTISRDNAKTTLYLQMNSLRPEDTAVYYCTIGG
SLSRSSQGTLVTVSSGGGGSGGGSEVQLVESGGGLVQPGGSLRLSCAASG
FTVSSYTMYWARQAPGKELEWVSIIFTNGEGTYYSDSVKGRFTVSRDNAK
NTLYLQMNSLKPEDTALYYCARDPFGKLKGQGTQVTVSS
<VEGF PMP1D2-9GS-ALB8, SEQ ID NO: 592;PRT;->
EVQLVESGGGLVQAGSSLRLSCVASGRSVSTYGMAWFRQAPGKEREFVAI
NRSTGTIYYADSVKGRFTISRDNAKNTLYLQMNSLKPGDTALYYCAADVF
FSGAHRYEASQWHYWGQGTQVTVSSGGGGSGGGSEVQLVESGGGLVQPGN
SLRLSCAASGFTFSSFGMSWVRQAPGKGLEWVSSISGSGSDTLYADSVKG
RFTISRDNAKTTLYLQMNSLRPEDTAVYYCTIGGSLSRSSQGTLVTVSS
<VEGF ALB8-9GS-PMP1D2, SEQ ID NO: 593;PRT;->
EVQLVESGGGLVQPGNSLRLSCAASGFTFSSFGMSWVRQAPGKGLEWVSS
ISGSGSDTLYADSVKGRFTISRDNAKTTLYLQMNSLRPEDTAVYYCTIGG
SLSRSSQGTLVTVSSGGGGSGGGSEVQLVESGGGLVQAGSSLRLSCVASG
RSVSTYGMAWFRQAPGKEREFVAINRSTGTIYYADSVKGRFTISRDNAKN
TLYLQMNSLKPGDTALYYCAADVFFSGAHRYEASQWHYWGQGTQVTVSS
<VEGF PMP12E3-9GS-ALB8, SEQ ID NO: 594;PRT;->
EVQLVESGGGLVQPGGSLRLSCAASVRTFSNYFMGWFRQAPGKEREFVAT
IGWSGTDYADSVKGRFTISRDNAKNTVYLQMNSLKPEDTAVYYCAAGYFK
RLGPTSPRDYTYWGQGTQVTVSSGGGGSGGGSEVQLVESGGGLVQPGNSL
RLSCAASGFTFSSFGMSWVRQAPCKGLEWVSSISGSGSDTLYADSVKGRF
TISRDNAKTTLYLQMNSLRPEDTAVYYCTIGGSLSRSSQGTLVTVSS
<VEGF ALB8-9GS-PMP12E3, SEQ ID NO: 595;PRT;->
EVQLVESGGGLVQPGNSLRLSCAASGFTFSSFGMSWVRQAPGKGLEWVSS
ISGSGSDTLYADSVKGRFTISRDNAKTTLYLQMNSLRPEDTAVYYCTIGG
SLSRSSQGTLVTVSSGGGGSGGGSEVQLVESGGGLVQPGGSLRLSCAASV
RTFSNYFMGWFRQAPGKEREFVATIGWSGTDYADSVKGRFTISRDNAKNT
VYLQMNSLKPEDTAVYYCAAGYFKRLGFTSPRDYTYWGQGTQVTVSS
<VEGF PMP7D7-9GS-ALB8, SEQ ID NO: 596;PRT;->
EVQLVESGGGLVQAGGSLRLSCVASGRTFGSYDMGWFRQAPGKEREFVAA
ISTGGGWRRYADSVKGRFTISRDNGKNTMYLQMNSLKPEDTAVYYCAQGW
SLAEFRSWGQGTQVTVSSGGGGSGGGSEVQLVESGGGLVQPGNSLRLSCA
ASGFTFSSFGMSWVRQAPGKGLEWVSSISGSGSDTLYADSVKGRFTISRD
NAKTTLYLQMNSLRPEDTAVYYCTIGGSLSRSSQGTLVTVSS
<VEGF ALB8-9GS-PMP7D7, SEQ ID NO: 597;PRT;->
EVQLVESGGGLVQPGNSLRLSCAASGFTFSSFGMSWVRQAPGKGLEWVSS
ISGSGSDTLYADSVKGRFTISRDNAKTTLYLQMNSLRPEDTAVYYCTIGG
SLSRSSQGTLVTVSSGGGGSGGGSEVQLVESGGGLVQAGGSLRLSCVASG
RTFGSYDMGWFRQAPGKFREFVAAISTGGGWRRYADSVKGRFTISRDNGK
NTMYLQMNSLKPEDTAVYYCAQGWSLAEFRSWGQGTQVTVSS
<VEGF PMP8F7-9GS-ALB8, SEQ ID NO: 598;PRT;->
EVQLVESGGGLVQAGGSLRLSCAASARTFSSYAMSWFRQAPGKERDFVAV
INWSGGSTYYADSVKGRFTISRDNAKNTVYLEMNSLKPEDTAVYYCASTA
FRRRTYYTPESWDYWGQGTQVTVSSGGGGSGGGSEVQLVESGGGLVQPGN
SLRLSCAASGFTFSSFGMSWVRQAPGKGLEWVSSISGSGSDTLYADSVKG
RFTISRDNAKTTLYLQMNSLRPEDTAVYYCTIGGSLSRSSQGTLVTVSS
<VEGF ALB8-9GS-PMP8F7, SEQ ID NO: 599;PRT;->
EVQLVESGGGLVQPGNSLRLSCAASGFTFSSFGMSWVRQAPGKGLEWVSS
ISGSGSDTLYADSVKGRFTISRDNAKTTLYLQMNSLRPEDTAVYYCTIGG
SLSRSSQGTLVTVSSGGGGSGGGSEVQLVESGGGLVQAGGSLRLSCAASA
RTFSSYAMSWFRQAPGKERDFVAVINWSGGSTYYADSVKGRFTISRDNAK
NTVYLEMNSLKPEDTAVYYCASTAFRRRTYYTPESWDYWGQGTQVTVSS
<VEGF PMP7G6-9GS-ALB8, SEQ ID NO: 600;PRT;->
EVQLVESGGGLVQAGDSLRLSCAASGLTFSAYTMGWFRQAPGKEREFVSA
TSRSGGATLYTDSVKGRFTISRDNAKNTVDLQMNNLKPGDTAVYYCAAKS
RPGYGGTLDYDYWGQGTQVTVSSGGGGSGGGSEVQLVESGGGLVQPGNSL
RLSCAASGFTFSSFGMSWVRQAPGKGLEWVSSISGSGSDTLYADSVKGRF
TISRDNAKTTLYLQMNSLRPEDTAVYYCTIGGSLSRSSQGTLVTVSS
<VEGF ALB8-9GS-PMP7G6, SEQ ID NO: 601;PRT;->
EVQLVESGGGLVQPGNSLRLSCAASGFTFSSFGMSWVRQAPGKGLEWVSS
ISGSGSDTLYADSVKGRFTISRDNAKTTLYLQMNSLRPEDTAVYYCTIGG
SLSRSSQGTLVTVSSGGGGSGGGSEVQLVESGGGLVQAGDSLRLSCAASG
LTFSAYTMGWFRQAPGKEREFVSATSRSGGATLYTDSVKGRFTISRDNAK
NTVDLQMNNLKPGDTAVYYCAAKSRPGYGGTLDYDYWGQGTQVTVSS
<VEGF PMP25B1-9GS-ALB8, SEQ ID NO: 602;PRT;->
EVQLVESGGGLVQSGGSLRLSCAASGLAFSTYAMGWFRQAPGKDREMVIA
LNWSGDRTWYLNSVKGRFTISRDNAKNTVSLQMNSLKPEDTAVYYCAAKA
SGTIRGGSYYDSAGYSHWGQGTQVTVSSGGGGSGGGSEVQLVESGGGLVQ
PGNSLRLSCAASGFTFSSFGMSWVRQAPGKGLEWVSSISGSGSDTLYADS
VKGRFTISRDNAKTTLYLQMNSLRPEDTAVYYCTIGGSLSRSSQGTLVTV
SS
<VEGF ALB8-9GS-PMP25B1, SEQ ID NO: 603;PRT;->
EVQLVESGGGLVQPGNSLRLSCAASGFTFSSFGMSWVRQAPGKGLEWVSS
ISGSGSDTLYADSVKGRFTISRDNAKTTLYLQMNSLRPEDTAVYYCTIGG
SLSRSSQGTLVTVSSGGGGSGGGSEVQLVESGGGLVQSGGSLRLSCAASG
LAFSTYAMGWFRQAPGKDREMVIALNWSGDRTWYLNSVKGRFTISRDNAK
NTVSLQMNSLKPEDTAVYYCAAKASGTIRGGSYYDSAGYSHWGQGTQVTV
SS
<VEGF PMP25E1-9GS-ALB8, SEQ ID NO: 604;PRT;->
EVQLVESGGGLVQAGVSLRLSCAASGRTFGNYNMGWFRQAQGKDRELVAA
IRWSEDRVWYLGSVRGRFTISRDNAKNTVYLQMNSLKPEDTAAYYCAAQD
RRRGDYYTPDYHYWGQGTQVTVSSGGGGSGGGSEVQLVESGGGLVQPGNS
LRLSCAASGFTFSSFGMSWVRQAPGKGLEWVSSISGSGSDTLYADSVKGR
FTISRDNAKTTLYLQMNSLRPEDTAVYYCTIGGSLSRSSQGTLVTVSS
<VEGF ALB8-9GS-PMP25E1, SEQ ID NO: 605;PRT;->
EVQLVESGGGLVQPGNSLRLSCAASGFTFSSFGMSWVRQAPGKGLEWVSS
ISGSGSDTLYADSVKGRFTISRDNAKTTLYLQMNSLRPEDTAVYYCTIGG
SLSRSSQGTLVTVSSGGGGSGGGSEVQLVESGGGLVQAGVSLRLSCAASG
RTFGNYNMGWFRQAQGKDRELVAAIRWSEDRVWYLGSVRGRFTISRDNAK
KTVYLQMNSLKPEDTAAYYCAAQDRRRGDYYTPDYHYWGQGTQVTVSS
<VEGF PMP25D1-9GS-ALB8, SEQ ID NO: 606;PRT;->
EVQLVESGGRLVQAGGSLRLSCAASGGIFSRYNMGWFRQAPGKEREFVAA
AHWSGGRMWYKDSVKGRFTMSRDNNKNTVYLQMNSLKSEDTAVYYCAADS
GAWGGSYYRAEEYVYWGQGTQVTVSSGGGGSGGGSEVQLVESGGGLVQPG
NSLRLSCAASGFTFSSFGMSWVRQAPGKGLEWVSSISGSGSDTLYADSVK
GRFTISRDNAKTTLYLQMNSLRPEDTAVYYCTIGGSLSRSSQGTLVTVSS
<VEGF ALB8-9GS-PMP25D1, SEQ ID NO: 607;PRT;->
EVQLVESGGGLVQPGNSLRLSCAASGFTFSSFGMSWVRQAFGKGLEWVSS
ISGSGSDTLYADSVKGRFTISRDNAKTTLYLQMNSLRPEDTAVYYCTIGG
SLSRSSQGTLVTVSSGGGGSGGGSEVQLVESGGRLVQAGGSLRLSCAASG
GIFSRYNMGWFRQAPGKEREFVAAAHWSGGRMWYKDSVKGRFTNSRDNNK
NTVYLQMNSLKSEDTAVYYCAADSGAWGGSYYRAEEYVYWGQGTQVTVSS
<VEGF PMP25C1-9GS-ALB8, SEQ ID NO: 608;PRT;->
EVQLVESGGGLVQAGASLRLSCAASGRTFSSYDMGWFRQAPGKERALVAA
ITSSGGRRWYADSVLGRFTISRDNAKNTVSLQMSSLRPEDTAVYYCAARG
RVDYNYYNKDAYTYWGQGTQVTVSSGGGGSGGGSEVQLVESGGGLVQPGN
SLRLSCAASGFTFSSFGMSWVRQAPGKGLEWVSSISGSGSDTLYADSVKG
RFTISRDNAKTTLYLQMNSLRPEDTAVYYCTIGGSLSRSSQGTLVTVSS
<VEGF ALB8-9GS-PMP25C1, SEQ ID NO: 609;PRT;->
EVQLVESGGGLVQPGNSLRLSCAASGFTFSSFGMSWVRQAPGKGLEWVSS
ISGSGSDTLYADSVKGRFTISRDNAKTTLYLQMNSLRPEDTAVYYCTIGG
SLSRSSQGTLVTVSSGGGGSGGGSEVQLVESGGGLVQAGASLRLSCAASG
RTFSSYDMGWFRQAPGKERALVAAITSSGGRRWYADSVLGRFTISRDNAK
NTVSLQMSSLRPEDTAVYYCAARGRVDYNYYNKDAYTYWGQGTQVTVSS
<VEGF PMP25D3-9GS-ALB8, SEQ ID NO: 610;PRT;->
EVQLVESGGRLVQAGDSLRLSCAASGGTVRNYAMGWFRQAPGQEREILSS
ITRTDNITYYEDSVKGRFTIVRDTAKNTVYLQMNSLKPEDTAVYYCAAAM
THFAVLEREYGYWGQGTQVTVSSGGGGSGGGSEVQLVESGGGLVQPGNSL
RLSCAASGFTFSSFGMSWVRQAPGKGLEWVSSISGSGSDTLYADSVKGRF
TISRDNAKTTLYLQMNSLRPEDTAVYYCTIGGSLSRSSQGTLVTVSS
<VEGF ALB8-9GS-PMP25D3, SEQ ID NO: 611;PRT;->
EVQLVESGGGLVQPGNSLRLSCAASGFTFSSFGMSWVRQAPGKGLEWVSS
ISGSGSDTLYADSVKGRFTISRDNAKTTLYLQMNSLRPEDTAVYYCTIGG
SLSPSSQGTLVTVSSGGGGSGGGSEVQLVESGGRLVQAGDSLRLSCAASG
GTVRNYAMGWFRQAPGQEREILSSITRTDNITYYEDSVKGRFTIVRDTAK
NTVYLQMNSLKPEDTAVYYCAAAMTHFAVLEREYGYWGQGTQVTVSS
<VEGF PMP14G5-9GS-ALB8, SEQ ID NO: 612;PRT;->
EVQLVESGGGLVQAGGSLRLSCAASGRTISSYTMGWFRQAPGKEREFVAA
GTWSTSVTEYADSVKGRFTISRDTAKNTLYLQMNSLKPEDTAVYYCAAEP
YIPVRTMRHMTFLTYWGQGTQVTVSSGGGGSGGGSEVQLVESGGGLVQPG
NSLRLSCAASGFTFSSFGMSWVRQAPGKGLEWVSSISGSGSDTLYADSVK
GRFTISRDNAKTTLYLQMNSLRPEDTAVYYCTIGGSLSRSSQGTLVTVSS
<VEGF ALB8-9GS-PMP14G5, SEQ ID NO: 613;PRT;->
EVQLVESGGGLVQPGNSLRLSCAASGFTFSSFGMSWVRQAPGKGLEWVSS
ISGSGSDTLYADSVKGRFTISRDNAKTTLYLQMNSLRPEDTAVYYCTIGG
SLSRSSQGTLVTVSSGGGGSGGGSEVQLVESGGGLVQAGGSLRLSCAASG
RTISSYTMGWFRQAPGKEREFVAAGTWSTSVTEYADSVKGRFTISRDTAK
NTLYLQMNSLKPEDTAVYYCAAEPYIPVRTMRHMTFLTYWGQGTQVTVSS
<VEGF PMP1C4-9GS-ALB8, SEQ ID NO: 614;PRT;->
EVQLVESGGGLVQAGGSLRLSCAPSGRDISSYIMGWFRQAPGKEREFTAD
INWNGSWRFYAESVNGRFTISRDNAKNTVYLQMNSLKPEDTAVYYCAAKE
RGSGAYDYWGQGTQVTVSSGGGGSGGGSEVQLVESGGGLVQPGNSLRLSC
AASGFTFSSFGMSWVRQAPGKGLEWVSSISGSGSDTLYADSVKGRFTISR
DNAKTTLYLQMNSLRPEDTAVYYCTIGGSLSRSSQGTLVTVSS
<VEGF ALB8-9GS-PMP1C4, SEQ ID NO: 615;PRT;->
EVQLVESGGGLVQPGNSLRLSCAASGFTFSSFGMSWVRQAPGKGLEWVSS
ISGSGSDTLYADSVKGRFTISRDNAKTTLYLQMNSLRPEDTAVYYCTIGG
SLSRSSQGTLVTVSSGGGGSGGGSEVQLVESGGGLVQAGGSLRLSCAPSG
RDISSYIMGWFRQAPGKEREFTADINWNGSWRFYAESVNGRFTISRDNAK
NTVYLQMNSLKPEDTAVYYCAAKERGSGAYDYWGQGTQVTVSS
>PVEGFPMP42B10-9GS-ALB8, SEQ ID NO: 616;PRT;->
EVQLVESGGGLVQAGGSLRLSCTASGRALDTYTVTWFRQTPGKEREFVAS
NRWNAKPYTTDSVKGRFTISRDNAKNTVYLQMNSLKPEDTAVYYCAADLT
TWADGPYRYWGQGTQVTVSSGGGGSGGGSEVQLVESGGGLVQPGNSLRLS
CAASGFTFSSFGMSWVRQAPGKGLEWVSSISGSGSDTLYADSVKGRFTIS
RDNAKTTLYLQMNSLRPEDTAVYYCTIGGSLSRSSQGTLVTVSS
>ALB8-9GS-PVEGFPMP42B10, SEQ ID NO: 617;PRT;->
EVQLVESGGGLVQPGNSLRLSCAASGFTFSSFGMSWVRQAPSKGLEWVSS
ISGSGSDTLYADSVKGRFTISRDNAKTTLYLQMNSLRPEDTAVYYCTIGG
SLSRSSQGTLVTVSSGGGGSGGGSEVQLVESGGGLVQAGGSLRLSCTASG
RALDTYTVTWFRQTPGKEREFVASNRWNAKPYTTDSVKGRFTISRDNAKN
TVYLQMNSLKPEDTAVYYCAADLTTWADGPYRYWGQGTQVTVSS
>PVEGFPMP42C5-9GS-ALB8, SEQ ID NO: 618;PRT;->
KVQLVESGGGLVQAGGSLRLSCAASGRALDTYTVTWFRQTPGKEREFVAS
IRWNAKPYTTDSVKGRFTISRDNAKNTVYLQMNSLKPEDTAIYYCAADLT
TWADGPYRYWGQGTQVTVSSGGGGSGGGSEVQLVESGGGLVQPGNSLRLS
CAASGFTFSSFGMSWVRQAPGKGLEWVSSISGSGSDTLYADSVKGRFTIS
RDNAKTTLYLQMNSLRPEDTAVYYCTIGGSLSRSSQGTLVTVSS
>ALB8-9GS-PVEGFPMP42C5, SEQ ID NO: 619;PRT;->
EVQLVESGGGLVQPGNSLRLSCAASGFTFSSFGMSWVRQAPGKGLEWVSS
ISGSGSDTLYADSVKGRFTISRDNAKTTLYLQMNSLRPEDTAVYYCTIGG
SLSRSSQGTLVTVSSGGGGSGGGSKVQLVESGGGLVQAGGSLRLSCAASG
RALDTYTVTWFRQTPGKEREFVASIRWNAKPYTTDSVKGRFTISRDNAKN
TVYLQMNSLKPEDTAIYYCAADLTTWADGPYRYWGQGTQVTVSS
>PVEGFPMP42H5-9GS-ALB8, SEQ ID NO: 620;PRT;->
EVQLVESGGGLVQAGGSLRLSCTASGRALDTYTVTWFRQTPGKEREFVAS
NRWNAKPYVTDSVKGRFTISRDNAKNTVYLQMNSLKPEDTAVYYCAADLT
TWADGPYRYWGQGTQVTVSSGGGGSGGGSEVQLVESGGGLVQPGNSLRLS
CAASGFTFSSFGMSWVRQAPGKGLEWVSSISGSGSDTLYADSVKGRFTIS
RDNAKTTLYLQMNSLRPEDTAVYYCTIGGSLSRSSQGTLVTVSS
>ALB8-9GS-PVEGFPMP42H5, SEQ ID NO: 621;PRT;->
EVQLVESGGGLVQPGNSLRLSCAASGFTFSSFGMSWVRQAPGKGLEWVSS
ISGSGSDTLYADSVKGRFTISRDNAKTTLYLQMNSLRPEDTAVYYCTIGG
SLSRSSQGTLVTVSSGGGGSGGGSEVQLVESGGGLVQAGGSLRLSCTASG
RALDTYTVTWFRQTPGKEREFVASNRWISAKPYVTDSVKGRFTISRDNAK
NTVYLQMNSLKPEDTAVYYCAADLTTWADGPYRYWGQGTQVTVSS
>PVEGFPMP42E12-9GS-ALB8, SEQ ID NO: 622;PRT;>
EVQLVESGGGLVQAGGSLRLSCAASGRALDTYTVTWFRQTPGKEREFVAS
DRWNAKPYTTDSVKGRFTISRDNAKNTVYLQMNSLKPEDTAVYYCAADLT
TWADGPYRFWGQGTQVTVSSGGGSSGGSSEVQLVESGGGLVQPGNSLRLS
CAASGFTFSSFGMSWVRQAPGKGLEWVSSISGSGSDTLYADSVKGRFTIS
RDNAKTTLYLQMNSLRPEDTAVYYCTIGGSDSRSSQGTLVTVSS
>ALB8-9GS-PVEGFPMP42E12, SEQ ID NO: 623;PRT;->
EVQLVESGGGLVQPGNSLRLSCAASGFTFSSFGMSWVRQAPGKGLEWVSS
ISGSGSDTLYADSVKGRFTISRDNAKTTLYLQMNSLRPEDTAVYYCTIGG
SLSRSSQGTLVTVSSGGGGSGGGSEVQLVESGGGLVQAGGSLRLSCAASG
RALDTYTVTWFRQTPGKEREFVASDRWNAKPYTTDSVKGRFTISRDNAKN
TVYLQMNSLKPEDTAVYYCAADLTTWADGPYRPWGQGTQVTVSS
>PVEGFPMP42E2-9GS-ALB8, SEQ ID NO: 624;PRT;->
EVQLVESGGGLVQAGGSLRLSCAASGRALDTYTVTWFRQTPGKGREFLAS
IRWNAKPYTTDSVKGRFTMSRDNAKNTVYLQMNSLRPEDTAVYYCAADPT
TWADGPYRYWGQGTQVTVSSGGGGSGGGSEVQLVESGGGLVQPGNSLRLS
CAASGFTFSSFGMSWVRQAPGKGLEWVSSISGSGSDTLYADSVKGRFTIS
RDNAKTTLYLQMNSLRPEDTAVYYCTIGGSLSRSSQGTLVTVSS
>ALB8-9GS-PVEGFPMP42E2, SEQ ID NO: 625;PRT;->
EVQLVESGGGLVQPGNSLRLSCAASGFTFSSFGMSWVRQAPGKGLEWVSS
ISGSGSDTLYADSVKGRFTISRDNAKTTLYLQMNSLRPEDTAVYYCTIGG
SLSRSSQGTLVTVSSGGGGSGGGSEVQLVESGGGLVQAGGSLRLSCAASG
RALDTYTVTWFRQTPGKGREFLASIRWNAKPYTTDSVKGRFTMSRDNAKN
TVYLQMNSLRPEDTAVYYCAADPTTWADGPYRYWGQGTQVTVSS
>PVEGFPMF42F1-9GS-ALB8, SEQ ID NO: 626;PRT;->
EVQLVESGGGLVQPGGSLRLSCAASGRALDTYTVTWFRQTPGKTREFVAS
VRWNAKPYTTDSVKGRFTISRDNAKNTVYLQMNSLKPEDTAVYYCAADPT
TWADGPYRYWGQGTQVTVSSGGGGSGGGSEVQLVESGGGLVQPGNSLRLS
CAASGFTFSSFGMSWVRQAPGKGLEWVSSISGSGSDTLYADSVKGRFTIS
RDNAKTTLYLQMNSLRPEDTAVYYCTIGGSLSRSSQGTLVTVSS
>ALB8-9GS-FVEGFPMP42F1, SEQ ID NO: 627;PRT;->
EVQLVESGGGLVQPGNSLRLSCAASGFTFSSFGMSWVRQAPGKGLEWVSS
ISGSGSDTLYADSVKGRFTISRDNAKTTLYLQMNSLRPEDTAVYYCTIGG
SLSRSSQGTLVTVSSGGGGSGGGSEVQLVESGGGLVQPGGSLRLSCAASG
RALDTYTVTWFRQTPGKTREFVASVRWNAKPYTTDSVKGRFTISRDNAKN
TVYLQMNSLKPEDTAVYYCAADPTTWADGPYRYWGQGTQVTVSS
>PVEGFPMP42G5-9GS-ALB8, SEQ ID NO: 628;PRT;->
EVHLVESGGGLVQAGGSLRLSCAASGRALDTYTVTWFRQTPGKTREFVAS
VRWNAKPYTTDSVKGRFTISRDNAKNTVYLQMNSLKPEDTAVYYCAADPT
TWADGPYRYWGQGTQVTVSSGGGGSGGGSEVQLVESGGGLVQPGNSLRLS
CAASGFTFSSPGMSWVRQAPGKGLEWVSSISGSGSDTLYADSVKGRFTIS
RDNAKTTLYLQMNSLRPEDTAVYYCTIGGSLSRSSQGTLVTVSS
>ALB8-9GS-PVEGFPMP42G5, SEQ ID NO: 629;PRT;->
EVQLVESGGGLVQPGNSLRLSCAASGFTFSSFGMSWVRQAPGKGLEWVSS
ISGSGSDTLYADSVKGRFTISRDNAKTTLYLQMNSLRPEDTAVYYCTIGG
SLSRSSQGTLVTVSSGGGGSGGGSEVHLVESGGGLVQAGGSLRLSCAASG
RALDPYTVTWFRQTPGKTREFVASVRWNAKPYTTDSVKGRFTISRDNAKN
TVYLQMNSLKPEDTAVYYCAADPTTWADGPYRYWGQGTQVTVSS
>PVEGFPMP42A9-9GS-ALB8, SEQ ID NO: 630;PRT;->
EVQLVESGGGLVQPGGSLRLSCAASGFTLDYYGIGWFRQAPGKEREWVSC
ISSSGGSTYYADSVKGRFTISRDNAKNTVYLQMNSLKPEDTAVYYCAAQK
GTPPLGCPAYYGMDYWGKGTLVTVSSGGGGSGGGSEVQLVESGGGLVQPG
NSLRLSCAASGFTFSSFGMSWVRQAPGKGLEWVSSISGSGSDTLYADSVK
GRFTISRDNAKTTLYLQMNSLRPEDTAVYYCTIGGSLSRSSQGTLVTVSS
>ALB8-9GS-PVEGFPMP42A9, SEQ ID NO: 631;PRT;>
EVQLVESGGGLVQPGNSLRLSCAASGFTFSSFGMSWVRQAPGKGLEWVSS
ISGSGSDTLYADSVKGRFTISRDNAKTTLYLQMNSLRPEDTAVYYCTIGG
SLSRSSQGTLVTVSSGGGGSGGGSEVQLVESGGGLVQPGGSLRLSCAASG
FTLDYYGIGWFRQAPGKEREWVSCISSSGGSTYYADSVKGRFTISRDNAK
NTVYLQMNSLKPEDTAVYYCAAQKGTPPLGCPAYYGMDYWGKGTLVTVSS
>PVEGFPMP42B5-9GS-ALB8, SEQ ID NO: 632;PRT;->
EVQLVESGGGLVQPGGSLRLSCAASGFTLDYYGIGWFRQAPGKEREWVSC
ISSSGGSTYYADSVKGRFTISRDNAKNTVYLQMNSLKPEDAAVYYCAAQK
GTPPLGCPAYYGMDYWGKGTLVTVSSGGGGSGGGSEVQLVESGGGLVQPG
NSLRLSCAASGFTFSSFGMSWVRQAPGKGLEWVSSISGSGSDTLYADSVK
GRFTISRDNAKTTLYLQMNSLRPEDTAVYYCTIGGSLSRSSQGTLVTVSS
>ALB8-9GS-PVEGFPMP42B5, SEQ ID NO: 633;PRT;->
EVQLVESGGGLVQPGNSLRLSCAASGFTFSSFGMSWVRQAPGKGLEWVSS
ISGSGSDTLYADSVKGRFTISRDNAKTTLYLQMNSLRPEDTAVYYCTIGG
SLSRSSQGTLVTVSSGGGGSGGGSEVQLVESGGGLVQPGGSLRLSCAASG
FTLDYYGIGWFRQAPGKEREWVSCISSSGGSTYYADSVKGRFTISRDNAK
KTVYLQMNSLKPEDAAVYYCAAQKGTPPLGCPAYYGMDYWGKGTLVTVSS
>PVEGFPMP42A5-9GS-ALB8, SEQ ID NO: 634;PRT;->
EVQLVESGGGLVQAGGSLRLSCAASGRTFSGVDVAWFRQAPGKEREFVAA
LAWSGIRTYYAVSVKGRFTISRGDPNDTVYLQMTSLKPEDTAVYYCATGR
ASRTSDYYTDRIYDSWGQGAQVTVSSGGGGSGGGSEVQLVESGGGLVQPG
NSLRLSCAASGFTFSSFGMSWVRQAPGKGLEWVSSISGSGSDTLYADSVK
GRFTISRDNAKTTLYLQMNSLRPEDTAVYYCTIGGSLSRSSQGTLVTVSS
>ALB8-9GS-PVEGFPMP42A5, SEQ ID NO: 635;PRT;->
EVQLVESGGGLVQPGNSLRLSCAASGFTFSSFGMSWVRQAPGKGLEWVSS
ISGSGSDTLYADSVKGRFTISRDNAKTTLYLQMNSLRPEDTAVYYCTIGG
SLSRSSQGTLVTVSSGGGGSGGGSEVQLVESGGGLVQAGGSLRLSCAASG
RTFSGVDVAWFRQAPGKEREFVAALAWSGIRTYYAVSVKGRFTISRGDPN
DTVYLQMTSLKPEDTAVYYCATGRASRTSDYYTDRIYDSWGQGAQVTVSS
>PVEGFPMP42A3-9GS-ALB8, SEQ ID NO: 636;PRT;->
EVPMVESGGGLVQAGGSLRLSCAASGRTFSGVDVAWFRQAPGKEREFVAA
LAWSGIRTYYAVSVKGRFTISRGDPNDTVYLQMTSLKPEDTAVYYCATGR
ASRTSDYYTDRIYDSWGQGAQVTVSSGGGGSGGGSEVQLVESGGGLVQPG
NSLRLSCAASGFTFSSFGMSWVRQAPGKGLEWVSSISGSGSDTLYADSVK
GRFTISRDNAKTTLYLQMNSLRPEDTAVYYCTIGGSLSRSSQGTLVTVSS
>ALB8S-9GS-PVEGFPMP42A3, SEQ ID NO: 637;PRT;->
EVQLVESGGGLVQPGNSLRLSCAASGFTFSSFGMSWVRQAPGKGLEWVSS
ISGSGSDTLYADSVKGRFTISRDNAKTTLYLQMNSLRPEDTAVYYCTIGG
SLSRSSQGTLVTVSSGGGGSGGGSEVPMVESGGGLVQAGGSLRLSCAASG
RTFSGVDVAWFRQAPGKEREFVAALAWSGIRTYYAVSVKGRFTISRGDPN
DTVYLQMTSLKPEDTAVYYCATGRASRTSDYYTDRIYDSWGQGAQVTVSS
>PVEGFPMP42F10-9GS-ALB8, SEQ ID NO: 638;PRT,->
EVQLVESGGGLVQAGGSLRLSCAASGRTPSGVDVAWFRQATGKEREFVAA
LAWSGIRTYYAVSVKGRFTISRGDPNDTVYLQMTSLKPEDTAVYYCATGR
ASRTSDYYTDRIYDSWGQGAQVTVSSGGGGSGGGSEVQLVESGGGLVQPG
NSLRLSCAASGFTFSSFGMSWVRQAPGKGLEWVSSISGSGSDTLYADSVK
GRFTISRDNAKTTLYLQMNSLRPEDTAVYYCTIGGSLSRSSQGTLVTVSS
>ALB8-9GS-PVEGFPMP42F10, SEQ ID NO: 639;PRT
EVQLVESGGGLVQPGNSLRLSCAASGFTFSSFGMSWVRQAPGKGLEWVSS
ISGSGSDTLYADSVKGRFTISRDNAKTTLYLQMNSLRPEDTAVYYCTIGG
SLSRSSQGTLVTVSSGGGGSGGGSEVQLVESGGGLVQAGGSLRLSCAASG
RTFSGVDVAWFRQATGKEREFVAALAWSGIRTYYAVSVKGRFTISRGDPN
DTVYLQMTSLKPEDTAVYYCATGRASRTSDYYTDRIYDSWGQGAQVTVSS
>PVEGFPMP42A11-9GS-ALB8, SEQ ID NO: 640;PRT;->
EVQLVESGGGLVQAGGSLRLSCAASGRTFSGVDVAWFRQAPGKEREFVAA
LAWSGIRTYYAVSVKGRFTISRGDPNDTVYLQMTSLKPEDTAVYYCATGR
ASSTSDYYTDRIYDSWGQGAQVTVSSGGGGSGGGSEVQLVESGGGLVQPG
NSLRLSCAASGFTFSSFGMSWVRQAPGKGLEWVSSISGSGSDTLYADSVK
GRFTISRDNAKTTLYLQMNSLRPEDTAVYYCTIGGSLSRSSQGTLVTVSS
>ALB8-9GS-PVEGFPMP42A11, SEQ ID NO: 641;PRT;->
EVQLVESGGGLVQPGNSLRLSCAASGFTFSSFGMSWVRQAPGKGLEWVSS
ISGSGSDTLYADSVKGRFTISRDNAKTTLYLQMNSLRPEDTAVYYCTIGG
SLSRSSQGTLVTVSSGGGGSGGGSEVQLVESGGGLVQAGGSLRLSCAASG
RTFSGVDVAWFRQAPGKEREFVAALAWSGIRTYYAVSVKGRFTISRGDPN
DTVYLQMTSLKPEDTAVYYCATGRASSTSDYYTDRIYDSWGQGAQVTVSS
>FVEGFPMP42C1-9GS-ALB8, SEQ ID NO: 642;PRT;->
EVQLVESGGGLVQAGGSLRLSCAASGRTFSGVDVAWFRQAPGKEREFVAA
LAWSGIRTYYAVSVKGRFTISRGNPNDTVYLQMTSLKPEDTAVYYCATGR
AYRGSDYYTDRIYDSWGQGAQVTVSSGGGGSGGGSEVQLVESGGGLVQPG
NSLRLSCAASGFTFSSFGMSWVRQAPGKGLEWVSSISGSGSDTLYADSVK
GRFTISRDNAKTTLYLQMNSLRPEDTAVYYCTIGGSLSRSSQGTLVTVSS
>ALB8-9GS-PVEGFPMP42C1, SEQ ID NO: 643;PRT;->
EVQLVESGGGLVQPGNSLRLSCAASGFTFSSFGMSWVRQAPGKGLEWVSS
ISGSGSDTLYADSVKGRFTISRDNAKTTLYLQMNSLRPEDTAVYYCTIGG
SLSRSSQGTLVTVSSGGGGSGGGSEVQLVESGGGLVQAGGSLRLSCAASG
RTFSGVDVAWFRQAPGKEREFVAALAWSGIRTYYAVSVKGRFTISRGNPN
DTVYLQMTSLKPEDTAVYYCATGRAYRGSDYYTDRIYDSWGQGAQVTVSS
>PVEGFPMP42C12-9GS-ALB8, SEQ ID NO: 644;PRT;->
EVQLVESGGGLVQPGGSLRLSCAASGRALSSYSVGWFRQAPGKEREFVTA
ISWSVPYYADSVKGRFTISRDNAKNTVYLQMNSLKPEDTAVYYCAADSLY
WRSSRMATDYDYWGQGTQVTVSSGGGGSGGGSEVQLVESGGGLVQPGNSL
RLSCAASGFTFSSFGMSWVRQAPGKGLEWVSSISGSGSDTLYADSVKGRF
TISRDNAKTTLYLQMNSLRPEDTAVYYCTIGGSLSRSSQGTLVTVSS
>ALB8-9GS-FVEGFPMP42C12, SEQ ID NO: 645;PRT;->
EVQLVESGGGLVQPGNSLRLSCAASGFTFSSFGMSWVRQAPGKGLEWVSS
ISGSGSDTLYADSVKGRFTISRDNAKTTLYLQMNSLRPEDTAVYYCTIGG
SLSRSSQGTLVTVSSGGGGSGGGSEVQLVESGGGLVQPGGSLRLSCAASG
RALSSYSVGWFRQAPGKEREFVTAISWSVPYYADSVKGRFTISRDNAKNT
VYLQMNSLKPEDTAVYYCAADSLYWRSSRMATDYDYWGQGTQVTVSS
>PVEGFPMP42H9-9GS-ALB8, SEQ ID NO: 646;PRT;->
EVQLVESGGGLVQAGGALRLSCAASGRTFETYRMGWFRQAPGKEREFVAL
INWSSGTTVYADSVKGRFTISGDNAKDTVYLEMNSLKPEDTAVYYCAVGR
RWSGSYYSALAYQYWGQGTQVTVSSGGGGSGGGSEVQLVESGGGLVQPGN
SLRLSCAASGFTFSSFGMSWVRQAPGKGLEWVSSISGSGSDTLYADSVKG
RFTISRDNAKTTLYLQMNSLRPEDTAVYYCTIGGSLSRSSQGTLVTVSS
>ALB8-9GS-PVEGFPMP42H9, SEQ ID NO: 647;PRT;->
EVQLVESGGGLVQPGNSLRLSCAASGFTFSSFGMSWVRQAPGKGLEWVSS
ISGSGSDTLYADSVKGRFTISRDNAKTTLYLQMNSLRPEDTAVYYCTIGG
SLSRSSQGTLVTVSSGGGGSGGGSEVQLVESGGGLVQAGGALRLSCAASG
RTFETYRMGWFRQAPGKEREFVALINWSSGTTVYADSVRGRFTISGDNAK
DTVYLEMNSLKPEDTAVYYCAVGRRWSGSYYSALAYQYWGQGTQVTVSS
>PVEGFPMP42E3-9GS-ALB8, SEQ ID NO: 648;PRT;->
EVQLVESGGGLVQAGGALRLSCAASGRTFETYRMGWFRQAPGKEREFVAL
INWSSGTTIYADSVKGRFTISGDNAKDTVYLEMNSLKPEDTAVYYCAVGR
RWSGSYYSALAYQYWGQGTQVTVSSGGGGSGGGSEVQLVESGGGLVQPGN
SLRLSCAASGFTFSSFGMSWVRQAPGKGLEWVSSISGSGSDTLYADSVKG
RETISRDNAKTTLYLQMNSLRPEDTAVYYCTIGGSLSRSSQGTLVTVSS
>ALB8-9GS-PVEGFPMP42E3, SEQ ID NO: 649;PRT;->
EVQLVESGGGLVQPGNSLRLSCAASGFTFSSFGMSWVRQAPGKGLEWVSS
ISGSGSDTLYADSVKGRFTISRDNAKTTLYLQMNSLRPEDTAVYYCTIGG
SLSRSSQGTLVTVSSGGGGSGGGSEVQLVESGGGLVQAGGALRLSCAASG
RTFETYRMGWFRQAPGKEREFVALINWSSGTTIYADSVKGRFTISGDNAK
DTVYLEMNSLKPEDTAVYYCAVGRRWSGSYYSALAYQYWGQGTQVTVSS
>PVEGFPMP42C7-9GS-ALB8, SEQ ID NO: 650;PRT;->
EVQLVESGGGLVQAGGALRLSCAASGRTFETYRMGWFRQAPGKEREFVAL
INWSSGTTIYADSVKGRFTISGDNAKDTVYLEMNSLKPEDTAVYYCAVGR
RWSGSYYSALAYQYWGKGTQVTVSSGGGGSGGGSEVQLVESGGGLVQPGN
SLRLSCAASGFTFSSFGMSWVRQAPGKGLEWVSSISGSGSDTLYADSVKG
RFTISRDNARTTLYLQMNSLRPEDTAVYYCTIGGSLSRSSQGTLVTVSS
>ALB8-9GS-PVEGFPMP42C7, SEQ ID NO: 651;PRT;->
EVQLVESGGGLVQPGNSLRLSCAASGFTFSSFGMSWVRQAPGKGLEWVSS
ISGSGSDTLYALSVKGRFTISRDNAKTTLYLQMNSLRPEDTAVYYCTIGG
SLSRSSQGTLVTVSSGGGGSGGGSEVQLVESGGGLVQAGGALRLSCAASG
RTFETYRMGWFRQAPGKEREFVALINWSSGTTIYADSVKGRFTISGDNAK
DTVYLEMNSLKPEDTAVYYCAVGRRWSGSYYSALAYQYWGKGTQVTVSS
>PVEGFPMP42D5-9GS-ALB8, SEQ ID NO: 652;PRT;->
EVQLVESGGGLVHAGGALRLSCAASGRAFETYRMOWFRQAPGKEREFVAL
INWSSGTTVYADSVKGRFTISGDNAKDTVYLEMNSLKPEDTAVYYCAVGR
RWSGSYYSALAYQYWGQGTQVTVSSGGGGSGGGSEVQLVESGGGLVQPGN
SLRLSCAASGFTFSSFGMSWVRQAPGKGLEWVSSISGSGSDTLYADSVKG
RFTISRDNAKTTLYLQMNSLRPEDTAVYYCTIGGSLSRSSQGTLVTVSS
>ALB8-9GS-PVEGFPMP42D5, SEQ ID NO: 653;PRT;->
EVQLVESGGGLVQPGNSLRLSCAASGFTFSSFGMSWVRQAPGKGLEWVSS
ISGSGSDTLYADSVKGRFTISRDNAKTTLYLQMNSLRPEDTAVYYCTIGG
SLSRSSQGTLVTVSSGGGGSGGGSEVQLVESGGGLVHAGGALRLSCAASG
RAFETYRMGWFRQAPGKEREFVALINWSSGTTVYADSVKGRFTISGDNAK
DTVYLEMNSLKPEDTAVYYCAVGRRWSGSYYSALAYQYWGQGTQVTVSS
>PVEGFPMP42D7-9GS-ALB8, SEQ ID NO: 654;PRT;->
EVQLVESGGGLVQAGGALRPSCAASGRTFETYRMGWFRQAPGKEREFVAL
INWSSGTTVYADSVKGRFTISGDNAKDTVYLEMNSLRPEDTAVYYCAVGR
RWSGSYYSALAYQYWGQGTQVTVSSGGGGSGGGSEVQLVESGGGLVQPGN
SLRLSCAASGFTFSSFGMSWVRQAPGKGLEWVSSISGSGSDTLYADSVKG
RFTISRDNAKTTLYLQMNSLRPEDTAVYYCTIGGSLSRSSQGTLVTVSS
>ALB8-9GS-PVEGFPMP42D7, SEQ ID NO: 655;PRT;->
EVQLVESGGGLVQPGNSLRLSCAASGFTFSSFGMSWVRQAPGKGLEWVSS
ISGSGSGTLYADSVKGRFTISRDNAKTTLYLQMNSLRPEDTAVYYCTIGG
SLSRSSQGTLVTVSSGGGGSGGGSEVQLVESGGGLVQAGGALRPSCAASG
RTFETYRMGWFRQAPGKEREFVALINWSSGTTVYADSVKGRFTISGDNAK
DTVYLEMNSLKPEDTAVYYCAVGRRWSGSYYSALAYQYWGQGTQVTVSS
>PVEGFPMP42C10-9GS-ALB8, SEQ ID NO: 656;PRT;>
EVQLVESGGGLVQAGGALRLSCAVSGRTFESYRNGWFRQAPGKEREFVSL
INWSSGKTIYADSVKGRETISGDNAKDTVYLEMNSLKPEDTAVYYCAVGR
AWSGSYYSALAYQYWGQGTQVTVSSGGGGSGGGSEVQLVESGGGLVQPGN
SLRLSCAASGFTFSSFGMSWVRQAPGKGLEWVSSISGSGSDTLYADSVKG
RFTISRDNAKTTLYLQMNSLRPEDTAVYYCTIGGSLSRSSQGTLVTVSS
>ALB8-9GS-PVEGFPMP42C10, SEQ ID NO: 657;PRT;->
EVQLVESGGGLVQPGNSLRLSCAASGFTFSSFGMSWVRQAPGKGLEWVSS
ISGSGSDTLYADSVKGRFTISRDNAKTTLYLQMNSLRPEDTAVYYCTIGG
SLSRSSQGTLVTVSSGGGGSGGGSEVQLVESGGGLVQAGGALRLSCAVSG
RTFESYRMGWFRQAPGKEREFVSLINWSSGKTIYADSVKGRFTISGDNAK
DTVYLEMNSLKPEDTAVYYCAVGRAWSGSYYSALAYQYWGQGTQVTVSS
>PVEGFPMP42D10-9GS-ALB8, SEQ ID NO: 658;PRT;->
EVQLVESGGGLVQAGGALRLSCAASGRTFETYRMGWFRQAPGKEREFVAL
INWSSGITVYLDSVKGRFTISGDNAKDTVYLEMNSLKPEDTAVYYCAVGR
AWSGSYYSALAYQYWGQGTQVTVSSGGGGSGGGSEVQLVESGGGLVQPGN
SLRLSCAASGFTFSSFGMSWVRQAPGKGLEWVSSISGSGSDTLYADSVKG
RFTTSRDNAKTTLYLQMNSLRPEDTAVYYCTIGGSLSRSSQGTLVTVSS
>ALB8-9GS-PVEGFPMP2D10 SEQ ID NO: 659;PRT;->
EVQLVESGGGLVQPGNSLRLSCAASGFTFSSFGMSWVRQAPGKGLEWVSS
ISGSGSDTLYADSVKGRFTISRDNAKTTLYLQMNSLRPEDTAVYYCTIGG
SLSRSSQGTLVTVSSGGGGSGGGSEVQLVESGGGLVQAGGALRLSCAASG
RTFETYRMGWFRQAPGKEREFVALINWSSGITVYLDSVKGRFTISGDNAK
DTVYLEMNSLKPEDTAVYYCAVGRAWSGSYYSALAYQYWGQGTQVTVSS
>PVEGFPMP42E4-9GS-ALB8, SEQ ID NO: 660;PRT;->
EVQLMESGGGLVQAGGSLRLSCAVSGRTFESYRMGWFRQAPGKEREFVSL
INWSSGKTIYADSVKGRFTISGDNAKDTVYLEMNSLKPEDTAVYYCAVGR
AWSGSYYSALAYQYWGQGTQVTVSSGGGGSGGGSEVQLVESGGGLVQPGN
SLRLSCAASGFTFSSFGMSWVRQAPGKGLEWVSSISGSGSDTLYADSVKG
RFTISRDNAKTTLYLQMNSLRPEDTAVYYCTIGGSLSRSSQGTLVTVSS
>ALB8-9GS-PVEGFPMP42E4, SEQ ID NO: 661;PRT;->
EVQLVESGGGLVQPGNSLRLSCAASGFTFSSFGMSWVRQAPGKGLEWVSS
ISGSGSDTLYADSVKGRFTISRDNAKTTLYLQMNSLRPEDTAVYYCTIGG
SLSRSSQGTLVTVSSGGGGSGGGSEVQLMESGGGLVQAGGSLRLSCAVSG
RTFESYRMGWFRQAPGKEREFVSLINWSSGKTIYADSVKGRFTISGDNAK
DTVYLEMNSLKPEDTAVYYCAVGRAWSGSYYSALAYQYWGQGTQVTVSS
>PVEGFPMP42B4-9GS-ALB8, SEQ ID NO: 662;PRT;->
EVQLVESGGGSVQAGGALRLSCAVSGRTFESYRMGWFRQAPGKEREFVSL
INWSSGKTIYADSVKGRFTISGDNAKDTVYLEMNSLKPEDTAVYYCAVGR
AWSGSHYSALAYQYWGQGTQVTVSSGGGGSGGGSEVQLVESGGGLVQPGN
SLRLSCAASGFTFSSFGMSWVRQAPGKGLEWVSSISGSGSDTLYADSVKG
RFTISRDNAKTTLYLQMNSLRPEDTAVYYCTTGGSLSRSSQGTLVTVSS
>ALB8-9GS-PVEGFPMP42B4, SEQ ID NO: 663;PRT;->
EVQLVESGGGLVQPGNSLRLSCAASGFTFSSFGMSWVRQAPGKGLEWVSS
ISGSGSDTLYADSVKGRFTISRDNAKTTLYLQMNSLRPEDTAVYYCTIGG
SLSRSSQGTLVTVSSGGGGSGGGSEVQLVESGGGSVQAGGALRLSCAVSG
RTFESYRMGWFRQAPGKEREFVSLINWSSGKTIYADSVKGRFTISGDNAK
DTVYLEMNSLKPEDTAVYYCAVGRAWSGSHYSALAYQYWGQGTQVTVSS
>PVEGFPMP42B11-9GS-ALB8, SEQ ID NO: 664;PRT;->
EVQLVESGGGLVQTGGSLRLSCAASGRTFGTYAMAWFRQSPKNEREFVAT
LRWSDGSTYYADSVKGRFTIAGDNAKNTVYLQMNNLKPEDTAVYYCAADR
WFSYTTYDATDTWHYWGQGTQVTVSSGGGGSGGGSEVQLVESGGGLVQPG
NSLRLSCAASGFTFSSFGMSWVRQAPGKGLEWVSSISGSGSDTLYADSVK
GRFTISRDNAKTTLYLQMNSLRPEDTAVYYCTIGGSLSRSSQGTLVTVSS
>ALB8-9GS-FVEGFPMP42B11, SEQ ID NO: 665;PRT;->
EVQLVESGGGLVQPGNSLRLSCAASGFTFSSFGMSWVRQAPGKGLEWVSS
ISGSGSDTLYADSVKGRFTISRDNAKTTLYLQMNSLRPEDTAVYYCTIGG
SLSRSSQGTLVTVSSGGGGSGGGSEVQLVESGGGLVQTGGSLRLSCAASG
RTFGTYAMAWFRQSPKNEREFVATLRWSDGSTYYADSVKGRFTIAGDNAK
NTVYLQMNNLKPEDTAVYYCAADRWFSYTTYDATDTWHYWGQGTQVTVSS

TABLE B-6
Trivalent-bispecific Nanbodies against VEGF

<VEGF ALB8-9GS-PMP1C4-9GS-PMP1C4,
SEQ ID NO: 666;PRT;->
EVQLVESGGGLVQPGNSLRLSCAASGFTFSSFGMSWVRQAPGKGLEWVSS
ISGSGSDTLYADSVKGRFTISRDNAKTTLYLQMNSLRPEDTAVYYCTIGG
SLSRSSQGTLVTVSSGGGGSGGGSEVQLVESGGGLVQAGGSLRLSCAPSG
RDISSYIMGWFRQAPGKEREFTADINWNGSWRFYAESVNGRFTISRDNAK
NTVYLQMNSLKPEDTAVYYCAAKERGSGAYDYWGQGTQVTVSSGGGGSGG
GSEVQLVESGGGLVQAGGSLRLSCAPSGRDISSYTMGWFRQAPGKEREFT
ADINWNGSWRFYAESVNGRFTISRDNAKNTVYLQMNSLKPEDTAVYYCAA
KERGSGAYDYWGQGTQVTVSS
>VEGF PMP1C4-30GS-ALB8-9GS-PMP1C4,
SEQ ID NO: 667;PRT;->
EVQLVESGGGLVQAGGSLRLSCAPSGRDISSYIMGWFRQAPGKEREFTAD
INWNGSWRFYAESVNGRFTISRDNAKNTVYLQMNSLKPEDTAVYYCAAKE
RGSGAYDYWGQGTQVTVSSGGGGSGGGGSGGGGSGGGGSGGGGSGGGGSE
VQLVESGGGLVQPGNSLRLSCAASGFTFSSFGMSWVRQAPGKGLEWVSSI
SGSGSDTLYADSVKGRFTISRDNAKTTLYLQMNSLRPEDTAVYYCTIGGS
LSRSSQGTLVTVSSGGGGSGGGSEVQLVESGGGLVQAGGSLRLSCAPSGR
DISSYIMGWFRQAPGKEREFTADINWNGSWRFYAESVNGRFTISRDNAKN
TVYLQMNSLKPEDTAVYYCAAKERGSGAYDYWGQGTQVTVSS
<VEGF PMP1C4-9GS-PMP1C4-30GS-ALB8,
SEQ ID NO: 668;PRT;->
EVQLVESGGGLVQAGGSLRLSCAPSGRDISSYIMGWFRQAFGKEREFTAD
INWNGSWRFYAESVNGRFTISRDNAKNTVYLQMNSLKPEDTAVYYCAAKE
RGSGAYDYWGQGTQVTVSSGGGGSGGGSEVQLVESGGGLVQAGGSLRLSC
APSGRDISSYIMGWFRQAPGKEREFTADINWNGSWRFYAESVNGRFTISR
DNAKNTVYLQMNSLKPEDTAVYYCAAKERGSGAYDYWGQGTQVTVSSGGG
GSGGGGSGGGGSGGGGSGGGGSGGGGSEVQLVESGGGLVQPGNSLRLSCA
ASGFTFSSFGMSWVRQAPGKGLEWVSSISGSGSDTLYADSVKGRFTISRD
NAKTTLYLQMNSLRPEDTAVYYCTIGGSLSRSSQGTLVTVSS
<VEGF ALB8-30GS-PMP1H10-30GS-PMP1H10,
SEQ ID NO: 669;PRT;->
EVQLVESGGGLVQPGNSLRLSCAASGFTFSSFGMSWVRQAPGKGLEWVSS
ISGSGSDTLYADSVKGRFTISRDNAKTTLYLQMNSLRPEDTAVYYCTIGG
SLSRSSQGTLVTVSSGGGGSGGGGSGGGGSGGGGSGGGGSGGGGSEVQLV
ESGGGLVQPGGSLRLSCAASGFTVSSYTMYWARQAPGKELEWVSIIFTNG
EGTYYSDSVKGRFTVSRDNAKNTLYLQMNSLKPEDTALYYCARDFFGKLK
GQGTQVTVSSGGGGSGGGGSGGGGSGGGGSGGGGSGGGGSEVQLVESGGG
LVQPGGSLRLSCAASGFTVSSYTMYWARQAPGKELEWVSIIFTNGEGTYY
SDSVKGRFTVSRDNAKNTLYLQMNSLKPEDTALYYCARDPFGKLKGQGTQ
VTVSS
<VEGF PMP1H10-9GS-ALB8-9GS-PM1PH10,
SEQ ID NO: 670;PRT;->
EVQLVESGGGLVQPGGSLRLSCAASGFTVSSYTMYWARQAPGKELEWVSI
IFTNGEGTYYSDSVKGRFTVSRDNAKNTLYLQMNSLKPEDTALYYCARDP
FGKLKGQGTQVTVSSGGGGSGGGSEVQLVESGGGLVQPGNSLRLSCAASG
FTFSSFGMSWVRQAPCKGLEWVSSISGSGSDTLYADSVKGRFTISRDNAK
TTLYLQMNSLRPEDTAVYYCTIGGSLSRSSQGTLVTVSSGGGGSGGGSEV
QLVESGGGLVQPGGSLRLSCAASGFTVSSYTMYWARQAPGKELEWVSIIF
TNGEGTYYSDSVRGRFTVSRDNAKNTLYLQMNSLKPEDTALYYCARDPFG
KLKGQGTQVTVSS
<VEGF PMP1H10-30GS-PMP1H10-9GS-ALB8,
SEQ ID NO: 671;PRT;->
EVQLVESGGGLVQPGGSLRLSCAASGFTVSSYTMYWARQAPGKELEWVSI
IFTNGEGTYYSDSVKGRFTVSRDNAKNTLYLQMNSLKPEDTALYYCARDP
FGKLKGQGTQVTVSSGGGGSGGGGSGGGGSGGGGSGGGGSGGGGSEVQLV
ESGGGLVQPGGSLRLSCAASGFTVSSYTMYWARQAPGKELEWVSIIFTNG
EGTYYSDSVKGRFTVSRDNAKNTLYLQMNSLKPEDTALYYCARDPFGKLK
GQGTQVTVSSGGGGSGGGSEVQLVESGGGLVQPGNSLRLSCAASGFTFSS
FGNSWVRQAPGKGLEWVSSISGSGSDTLYADSVKGRFTISRDNAKTTLYL
QMNSLRPEDTAVYYCTIGGSLSRSSQGTLVTVSS
<VEGF ALB8-9GS-PMP1F7-30GS-PMP1F7,
SEQ ID NO: 672;PRT;->
EVQLVESGGGLVQPGNSLRLSCAASGFTFSSFGMSWVRQAPGKGLEWVSS
ISGSGSDTLYADSVKGRFTISRDNAKTTLYLQMNSLRPEDTAVYYCTIGG
SLSRSSQGTLVTVSSGGGGSGGGSEVQLVESGGGLVQPGGSLRLSCAASG
FTFSNYWMYWLRQAPGKGLESVSSINTGGARTFYADSVKGRFTISRDNAK
NTLYLQMNSLKSEDTAVYYCAKDAAGRTRGQGTQVTVSSGGGGSGGGGSG
GGGSGGGGSGGGGSGGGGSEVQLVESGGGLVQPGGSLRLSCAASGFTFSN
YWMYWLRQAPGKGLESVSSINTGGARTFYADSVKGRFTISRDNAKNTLYL
QMNSLKSEDTAVYYCAKDAAGRTRGQGTQVTVSS
<VEGF PMP1F7-30GS-ALB8-30GS-PMP1F7,
SEQ ID NO: 673;PRT;->
EVQLVESGGGLVQPGGSLRLSCAASGFTFSNYWMYWLRQAPGKGLESVSS
INTGGARTFYADSVKGRFTISRDNAKNTLYLQMNSLKSEDTAVYYCAKDA
AGRTRGQGTQVTVSSGGGGSGGGGSGGGGSGGGGSGGGGSGGGGSEVQLV
ESGGGLVQPGNSLRLSCAASGFTFSSFGMSWVRQAPGKGLEWVSSISGSG
SDTLYADSVKGRFTISRDNAKTTLYLQMNSLRPEDTAVYYCTIGGSLSRS
SQGTLVTVSSGGGGSGGGGSGGGGSGGGGSGGGGSGGGGSEVQLVESGGG
LVQPGGSLRLSCAASGFTFSNYWMYWLRQAPGKGLESVSSINTGGARTFY
ADSVKGRFTISRDNAKNTLYLQMNSLKSEDTAVYYCAKDAAGRTRGQGTQ
VTVSS
<VEGF PMP1F7-9GS-PMPF7-9GS-ALB8,
SEQ ID NO: 674;PRT;->
EVQLVESGGGLVQPGGSLRLSCAASGFTFSNYWMYWLRQAPGKGLESVSS
INTGGARTFYADSVKGRFTISRDNAKNTLYLQMNSLKSEDTAVYYCAKDA
AGRTRGQGTQVTVSSGGGGSGGGSEVQLVESGGGLVQPGGSLRLSCAASG
FTFSNYWMYWLRQAPGKGLESVSSINTGGARTFYADSVKGRFTISRDNAK
NTLYLQMNSLKSEDTAVYYCAKDAAGRTRGQGTQVTVSSGGGGSGGGSEV
QLVESGGGLVQPGNSLRLSCAASGFTFSSFGMSWVRQAPGKGLEWVSSIS
GSGSDTLYADSVKGRFTISRDNAKTTLYLQMNSLRPEDTAVYYCTIGGSL
SRSSQGTLVTVSS
>ALB8-30GS-PVEGFPMP42B10-30GS-PMP42B10,
SEQ ID NO: 675;PRT;->
EVQLVESGGGLVQPGNSLRLSCAASGFTFSSFGMSWVRQAPGKGLEWVSS
ISGSGSDTLYADSVKGRFTISRDNAKTTLYLQMNSLRPEDTAVYYCTIGG
SLSRSSQGTLVTVSSGGGGSGGGGSGGGGSGGGGSGGGGSGGGGSEVQLV
ESGGGLVQAGGSLRLSCTASGRALDTYTVTWFRQTPGKEREFVASNRWNA
KPYTTDSVKGRFTISRDNAKNTVYLQMNSLKPEDTAVYYCAADLTTWADG
PYRYWGQGTQVTVSSGGGGSGGGGSGGGGSGGGGSGGGGSGGGGSEVQLV
ESGGGLVQAGGSLRLSCTASGRALDTYTVTWFRQTPGKEREFVASNRWNA
KPYTTDSVKGRFTISRDNAKNTVYLQMNSLKPEDTAVYYCAADLTTWADG
PYRYWGQGTQVTVSS
>PVEGFPMP42B10-9GS-ALB8-9GS-PMP42B10,
SEQ ID NO: 676;PRT;->
EVQLVESGGGLVQAGGSLRLSCTASGRALDTYTVTWFRQTPGKEREFVAS
NRWNAKPYTTDSVKGRFTISRDNAKNTVYLQMNSLKPEDTAVYYCAADLT
TWADGPYRYWGQGTQVTVSSGGGGSGGGSEVQLVESGGGLVQPGNSLRLS
CAASGFTFSSFGMSWVRQAPGKGLEWVSSISGSGSDTLYADSVKGRFTIS
RDNAKTTLYLQMNSLRPEDTAVYYCTIGGSLSRSSQGTLVTVSSGGGGSG
GGSEVQLVESGGGLVQAGGSLRLSCTASGRALDTYTVTWFRQTPGKEREF
VASNRWNAKPYTTDSVKGRFTISRDNAKNTVYLQMNSLKPEDTAVYYCAA
DLTTWADGPYRYWGQGTQVTVSS
>PVEGFPMP42B10-30GS-PMP42B10-9GS-ALB8,
SEQ ID NO: 677;PRT;->
EVQLVESGGGLVQAGGSLRLSCTASGRALDTYTVTWFRQTPGKEREFVAS
NRWNAKPYTTDSVKGRFTISRDNAKNTVYLQMNSLKPEDTAVYYCAADLT
TWADGPYRYWGQGTQVTVSSGGGGSGGGGSGGGGSGGGGSGGGGSGGGGS
EVQLVESGGGLVQAGGSLRLSCTASGRALDTYTVTWFRQTPGKEREFVAS
NRWNAKPYTTDSVKGRFTISRDNAKNTVYLQMNSLKPEDTAVYYCAADLT
TWADGPYRYWGQGTQVTVSSGGGGSGGGSEVQLVESGGGLVQPGNSLRLS
QAASGFTFSSFGMSWVRQAPGKGLEWVSSISGSGSDTLYADSVKGRFTIS
RDNAKTTLYLQMNSLRPEDTAVYYCTIGGSLSRSSQGTLVTVSS

TABLE C-1
Off rates for the different anti-VEGF Nanobodies

| | k_{off} (1/s) |
|---|---|
| On VEGF 1-109 | |
| PMP42A1 | 5.95E−04 |
| PMP42A2 | 5.96E−04 |
| PMP42A3 | 2.84E−03 |
| PMP42A4 | 6.09E−03 |
| PMP42A5 | 1.67E−03 |
| PMP42A10 | 5.69E−04 |
| PMP42B1 | 1.11E−03 |
| PMP42B3 | 1.77E−03 |
| PMP42B8 | 5.78E−04 |
| PMP42B9 | 5.80E−04 |
| PMP42B10 | 2.27E−04 |
| PMP42C1 | 8.25E−03 |
| PMP42C3 | 5.81E−04 |
| PMP42C5 | 4.48E−04 |
| PMP42C7 | 6.10E−04 |
| PMP42C8 | 7.64E−03 |
| PMP42C10 | 7.53E−03 |
| PMP42C11 | 1.63E−04 |
| PMP42D2 | 5.79E−04 |
| PMP42D3 | 7.57E−03 |
| PMP42D4 | 1.61E−03 |
| PMP42D5 | 3.68E−04 |
| PMP42D7 | 1.76E−04 |
| PMP42D8 | 1.74E−03 |
| PMP42D9 | 2.22E−04 |
| PMP42D10 | 4.11E−03 |
| PMP42E1 | 1.96E−04 |
| PMP42E2 | 1.34E−04 |
| PMP42E3 | 6.89E−04 |
| PMP42E4 | 7.74E−03 |
| PMP42E5 | 7.48E−03 |
| PMP42E7 | 3.60E−04 |
| PMP42E8 | 1.54E−03 |
| PMP42E9 | 7.47E−03 |
| PMP42E10 | 2.01E−03 |
| PMP42E11 | 7.47E−03 |
| PMP42F1 | 2.78E−04 |
| PMP42F3 | 1.88E−04 |
| PMP42F4 | 1.83E−04 |
| PMP42F5 | 6.75E−03 |
| PMP42F7 | 2.19E−04 |
| PMP42F10 | 1.76E−03 |
| PMP42G2 | 1.19E−04 |
| PMP42G3 | 6.15E−04 |
| PMP42G5 | 2.51E−04 |
| PMP42G7 | 7.84E−03 |
| PMP42G8 | 7.70E−03 |
| PMP42G9 | 7.54E−03 |
| PMP42G10 | 7.55E−03 |
| PMP42H1 | 1.31E−04 |
| PMP42H3 | 1.07E−01 |
| PMP42H4 | 5.44E−04 |
| PMP42H5 | 3.15E−04 |
| PMP42H7 | 9.27E−02 |
| PMP42H8 | 5.44E−04 |
| PMP42H9 | 3.15E−04 |
| PMP42H10 | 7.33E−03 |
| PMP42H11 | 1.04E−01 |
| On VEGF 1-165 | |
| PMP42A1 | 1.39E−03 |
| PMP42A2 | 1.42E−03 |
| PMP42A3 | 2.59E−03 |
| PMP42A4 | 1.73E−02 |
| PMP42A5 | 1.54E−03 |
| PMP42A10 | 1.35E−03 |
| PMP42B1 | 1.63E−03 |
| PMP42B3 | 1.63E−03 |
| PMP42B8 | 1.38E−03 |
| PMP42B9 | 1.49E−03 |
| PMP42B10 | 3.62E−04 |
| PMP42C1 | 8.35E−03 |
| PMP42C3 | 1.42E−03 |
| PMP42C5 | 6.41E−04 |
| PMP42C7 | 1.51E−03 |
| PMP42C8 | 0.0164 |
| PMP42C10 | 1.68E−02 |
| PMP42C11 | 3.05E−04 |
| PMP42D2 | 1.48E−03 |
| PMP42D3 | 1.62E−02 |
| PMP42D4 | 1.57E−03 |
| PMP42D5 | 1.47E−03 |
| PMP42D7 | 9.40E−04 |
| PMP42D8 | 1.64E−03 |
| PMP42D9 | 3.55E−04 |
| PMP42D10 | 6.34E−03 |
| PMP42E1 | 4.08E−04 |
| PMP42E2 | 3.11E−04 |
| PMP42E3 | 1.50E−03 |
| PMP42E4 | 2.00E−02 |
| PMP42E5 | 1.93E−02 |
| PMP42E7 | 1.28E−03 |
| PMP42E8 | 1.53E−03 |
| PMP42E9 | 1.88E−02 |
| PMP42E10 | / |
| PMP42E11 | 1.91E−02 |
| PMP42F1 | 5.01E−04 |
| PMP42F3 | 4.13E−04 |
| PMP42F4 | 3.93E−04 |
| PMP42F5 | 1.74E−02 |
| PMP42F7 | 6.33E−04 |
| PMP42F10 | 1.65E−03 |
| PMP42G2 | 2.78E−04 |
| PMP42G3 | 1.65E−03 |
| PMP42G5 | 4.47E−04 |
| PMP42G7 | 1.63E−02 |
| PMP42G8 | 1.62E−02 |
| PMP42G9 | 1.61E−02 |
| PMP42G10 | 1.62E−02 |
| PMP42HI | 2.52E−04 |
| PMP42H3 | 9.41E−02 |
| PMP42H4 | 1.39E−03 |
| PMP42H5 | 5.28E−04 |
| PMP42H7 | 8.32E−02 |
| PMP42H8 | 1.60E−02 |
| PMP42H9 | 1.49E−03 |
| PMP42H10 | 1.60E−02 |
| PMP42H11 | 9.47E−02 |

1. Amino acid sequence that is directed against and/or that can specifically bind to VEGF and that essentially consists of a Nanobody® that
i) has at least 80% amino acid identity with at least one of the amino acid sequences of SEQ ID NO's: 1 to 22, in which for the purposes of determining the degree of amino acid identity, the amino acid residues that form the CDR sequences are disregarded; and in which:
ii) preferably one or more of the amino acid residues at positions 11, 37, 44, 45, 47, 83, 84, 103, 104 and 108 according to the Kabat numbering are chosen from the Hallmark residues mentioned in Table A-3.

2. Amino acid sequence according to claim 1, that essentially consists of a Nanobody® that
i) has at least 80% amino acid identity with at least one of the amino acid sequences of SEQ ID NO's: 441-485, in which for the purposes of determining the degree of amino acid identity, the amino acid residues that form the CDR sequences are disregarded;
and in which:
ii) preferably one or more of the amino acid residues at positions 11, 37, 44, 45, 47, 83, 84, 103, 104 and 108 according to the Kabat numbering are chosen from the Hallmark residues mentioned in Table A-3.

3. Amino acid sequence according to claim 1 any of claim 1 or 2, that essentially consists of a humanized Nanobody®.

4. Amino acid sequence directed against and/or that can specifically bind to VEGF, that comprises one or more stretches of amino acid residues chosen from the group consisting of:
a) the amino acid sequences of SEQ ID NO's: 171-215;
b) amino acid sequences that have at least 80% amino acid identity with at least one of the amino acid sequences of SEQ ID NO's: 171-215;
c) amino acid sequences that have 3, 2, or 1 amino acid difference with at least one of the amino acid sequences of SEQ ID NO's: 171-215;
d) the amino acid sequences of SEQ ID NO's: 261-305;
e) amino acid sequences that have at least 80% amino acid identity with at least one of the amino acid sequences of SEQ ID NO's: 261-305;
f) amino acid sequences that have 3, 2, or 1 amino acid difference with at least one of the amino acid sequences of SEQ ID NO's: 261-305;
g) the amino acid sequences of SEQ ID NO's: 351-395;
h) amino acid sequences that have at least 80% amino acid identity with at least one of the amino acid sequences of SEQ ID NO's: 351-395;
i) amino acid sequences that have 3, 2, or 1 amino acid difference with at least one of the amino acid sequences of SEQ ID NO's: 351-395;
or any suitable combination thereof.

5. Amino acid sequence according to claim 4, in which at least one of said stretches of amino acid residues forms part of the antigen binding site for binding against VEGF.

6. Amino acid sequence according to claim 4, that comprises two or more stretches of amino acid residues chosen from the group consisting of:
a) the amino acid sequences of SEQ ID NO's: 171-215;
b) amino acid sequences that have at least 80% amino acid identity with at least one of the amino acid sequences of SEQ ID NO's: 171-215;
c) amino acid sequences that have 3, 2, or 1 amino acid difference with at least one of the amino acid sequences of SEQ ID NO's: 171-215;
d) the amino acid sequences of SEQ ID NO's: 261-305;
e) amino acid sequences that have at least 80% amino acid identity with at least one of the amino acid sequences of SEQ ID NO's: 261-305;
f) amino acid sequences that have 3, 2, or 1 amino acid difference with at least one of the amino acid sequences of SEQ ID NO's: 261-305;
g) the amino acid sequences of SEQ ID NO's: 351-395;
h) amino acid sequences that have at least 80% amino acid identity with at least one of the amino acid sequences of SEQ ID NO's: 351-395;
i) amino acid sequences that have 3, 2, or 1 amino acid difference with at least one of the amino acid sequences of SEQ ID NO's: 351-395;
such that (i) when the first stretch of amino acid residues corresponds to one of the amino acid sequences according to a), b) or c), the second stretch of amino acid residues corresponds to one of the amino acid sequences according to d), e), f), g), h) or i); (ii) when the first stretch of amino acid residues corresponds to one of the amino acid sequences according to d), e) or f), the second stretch of amino acid residues corresponds to one of the amino acid sequences according to a), b), c), g), h) or i); or (iii) when the first stretch of amino acid residues corresponds to one of the amino acid sequences according to g), h) or i), the second stretch of amino acid residues corresponds to one of the amino acid sequences according to a), b), c), d), e) or f).

7. Amino acid sequence according to claim 6, in which the at least two stretches of amino acid residues form part of the antigen binding site for binding against VEGF.

8. Amino acid sequence according to claim 4, that comprises three or more stretches of amino acid residues, in which the first stretch of amino acid residues is chosen from the group consisting of:
a) the amino acid sequences of SEQ ID NO's: 171-215;
b) amino acid sequences that have at least 80% amino acid identity with at least one of the amino acid sequences of SEQ ID NO's: 171-215;
c) amino acid sequences that have 3, 2, or 1 amino acid difference with at least one of the amino acid sequences of SEQ ID NO's: 171-215;
the second stretch of amino acid residues is chosen from the group consisting of:
d) the amino acid sequences of SEQ ID NO's: 261-305;
e) amino acid sequences that have at least 80% amino acid identity with at least one of the amino acid sequences of SEQ ID NO's: 261-305;
f) amino acid sequences that have 3, 2, or 1 amino acid difference with at least one of the amino acid sequences of SEQ ID NO's: 261-305;
and the third stretch of amino acid residues is chosen from the group consisting of:
g) the amino acid sequences of SEQ ID NO's: 351-395;
h) amino acid sequences that have at least 80% amino acid identity with at least one of the amino acid sequences of SEQ ID NO's: 351-395;
i) amino acid sequences that have 3, 2, or 1 amino acid difference with at least one of the amino acid sequences of SEQ ID NO's: 351-395.

9. Amino acid sequence according to claim 8, in which the at least three stretches of amino acid residues forms part of the antigen binding site for binding against VEGF.

10. Amino acid sequence according to claim 4, in which the CDR sequences of said amino acid sequence have at least 70% amino acid identity, preferably at least 80% amino acid identity, more preferably at least 90% amino acid identity, such as 95% amino acid identity or more or even essentially 100% amino acid identity with the CDR sequences of at least one of the amino acid sequences of SEQ ID NO's: 441-485.

11. Amino acid sequence that essentially consists of 4 framework regions (FR1 to FR4, respectively) and 3 complementarity determining regions (CDR1 to CDR3, respectively), in which:
CDR1 is chosen from the group consisting of:
a) the amino acid sequences of SEQ ID NO's: 171-215;
b) amino acid sequences that have at least 80% amino acid identity with at least one of the amino acid sequences of SEQ ID NO's: 171-215;
c) amino acid sequences that have 3, 2, or 1 amino acid difference with at least one of the amino acid sequences of SEQ ID NO's: 171-215; and/or
CDR2 is chosen from the group consisting of:
d) the amino acid sequences of SEQ ID NO's: 261-305;
e) amino acid sequences that have at least 80% amino acid identity with at least one of the amino acid sequences of SEQ ID NO's: 261-305;
f) amino acid sequences that have 3, 2, or 1 amino acid difference with at least one of the amino acid sequences of SEQ ID NO's: 261-305; and/or
CDR3 is chosen from the group consisting of:
g) the amino acid sequences of SEQ ID NO's: 351-395;
h) amino acid sequences that have at least 80% amino acid identity with at least one of the amino acid sequences of SEQ ID NO's: 351-395;
i) amino acid sequences that have 3, 2, or 1 amino acid difference with at least one of the amino acid sequences of SEQ ID NO's: 351-395.

12. Amino acid sequence according to claim 11, in which the CDR sequences of said amino acid sequence has at least 70% amino acid identity, preferably at least 80% amino acid identity, more preferably at least 90% amino acid identity, such as 95% amino acid identity or more or even essentially 100% amino acid identity with the CDR sequences of at least one of the amino acid sequences of SEQ ID NO's: 441-485.

13. Amino acid sequence directed against VEGF that cross-blocks the binding of at least one of the amino acid sequences according to claim 3 to VEGF.

14. Amino acid sequence directed against VEGF that is cross-blocked from binding to VEGF by at least one of the amino acid sequences according to claim 3.

15. Amino acid sequence according to claim 1 any of claims 1, that is directed against and/or that can specifically bind to the binding site on VEGF for VEGFR-1 and/or to the binding site on VEGF for VEGFR-2.

16. Amino acid sequence according to claim 1, that inhibits binding of VEGF to VEGFR-1.

17. Amino acid sequence according to claim 1, that inhibits binding of VEGF to VEGFR-1 without inhibiting binding of VEGF to VEGFR-2.

18. Amino acid sequence according to claim 1, that inhibits binding of VEGF to VEGFR-2.

19. Amino acid sequence according to claim 1, that inhibits binding of VEGF to VEGFR-2 without inhibiting binding of VEGF to VEGFR-1.

20. Amino acid sequence according to claim 1, that inhibits binding of VEGF to VEGFR-1 and binding of VEGF to VEGFR-2.

21-23. (canceled)

24. Amino acid sequence according to claim 1, that can specifically bind to VEGF with a dissociation constant (K_{D}) of 10⁻⁵ to 10⁻¹² moles/litre or less, and preferably 10⁻⁷ to 10⁻¹² moles/litre or less and more preferably 10⁻⁸ to 10⁻¹² moles/litre.

25. Amino acid sequence according to claim 1, that can specifically bind to VEGF with a rate of association (kₒₙ-rate) of between 10² M⁻¹s⁻¹ to about 10⁷ M⁻¹s⁻, preferably between 10³ M⁻¹s⁻¹ and 10⁷ M⁻¹s⁻¹, more preferably between 10⁴ M⁻¹s⁻¹ and 10⁷ M⁻¹s⁻¹, such as between 10⁵ M⁻¹s⁻¹ and 107 M⁻¹s⁻¹.

26. Amino acid sequence according to claim 1, that can specifically bind to VEGF with a rate of dissociation (k_{off} rate) between 1 s⁻¹ and 10⁻⁶ s⁻¹, preferably between 10⁻² s⁻¹ and 10⁻⁶ s⁻¹, more preferably between 10⁻³ s⁻¹ and 10⁻⁶ s⁻¹, such as between 10⁻⁴ s⁻¹ and 10⁻⁶ s⁻¹.

27. Amino acid sequence according to claim 1, that can specifically bind to VEGF with an affinity less than 500 nM, preferably less than 200 nM, more preferably less than 10 nM, such as less than 500 pM.

28. (canceled)

29. Amino acid sequence according to claim 1, that comprises an immunoglobulin fold or that under suitable conditions is capable of forming an immunoglobulin fold.

30-32. (canceled)

33. Amino acid sequence according to claim 1, that essentially consists of a light chain variable domain sequence (e.g. a VL-sequence); or of a heavy chain variable domain sequence (e.g. a VH-sequence).

34. Amino acid sequence according to claim 1, that essentially consists of a heavy chain variable domain sequence that is derived from a conventional four-chain antibody or that essentially consist of a heavy chain variable domain sequence that is derived from heavy chain antibody.

35. Amino acid sequence according to claim 1, that essentially consists of a domain antibody (or an amino acid sequence that is suitable for use as a domain antibody), of a single domain antibody (or an amino acid sequence that is suitable for use as a single domain antibody), of a “dAb” (or an amino acid sequence that is suitable for use as a dAb) or of a Nanobody® (including but not limited to a VHH sequence).

36. (canceled)

37. Amino acid sequence according to claim 3, that essentially consists of a Nanobody® that
a) has at least 80% amino acid identity with at least one of the amino acid sequences of SEQ ID NO's: 1 to 22, in which for the purposes of determining the degree of amino acid identity, the amino acid residues that form the CDR sequences are disregarded;
and in which:
b) preferably one or more of the amino acid residues at positions 11, 37, 44, 45, 47, 83, 84, 103, 104 and 108 according to the Kabat numbering are chosen from the Hallmark residues mentioned in Table A-3.

38. Amino acid sequence according to claim 3, that essentially consists of a Nanobody® that
a) has at least 80% amino acid identity with at least one of the amino acid sequences of SEQ ID NO's: 441-485, in which for the purposes of determining the degree of amino acid identity, the amino acid residues that form the CDR sequences are disregarded;
and in which:
b) preferably one or more of the amino acid residues at positions 11, 37, 44, 45, 47, 83, 84, 103, 104 and 108 according to the Kabat numbering are chosen from the Hallmark residues mentioned in Table A-3.

39. (canceled)

40. Amino acid sequence according to claim 1, that in addition to the at least one binding site for binding formed by the CDR sequences, contains one or more further binding sites for binding against other antigens, proteins or targets.

41. Compound or construct, that comprises or essentially consists of one or more amino acid sequences according to claim 1, and optionally further comprises one or more other groups, residues, moieties or binding units, optionally linked via one or more linkers.

42. Compound or construct according to claim 41, in which said one or more other groups, residues, moieties or binding units are amino acid sequences.

43-44. (canceled)

45. Compound or construct according to claim 41, in which said one or more other groups, residues, moieties or binding units are chosen from the group consisting of domain antibodies, amino acid sequences that are suitable for use as a domain antibody, single domain antibodies, amino acid sequences that are suitable for use as a single domain antibody, “dAb”'s, amino acid sequences that are suitable for use as a dAb, or Nanobodies.

46. Compound or construct according to claim 45, which comprises or essentially consists of a Nanobody against VEGF and a Nanobody against VEGFR-1 and/or VEGR-2.

47. Compound or construct according to claim 45, which comprises or essentially consists of a Nanobody against VEGF and a Nanobody against a tumor antigen.

48. Compound or construct according to claim 45, which comprises or essentially consists of a Nanobody against the binding site on VEGF for VEGFR-1 and a Nanobody against the binding site on VEGF for VEGFR-2.

49. Monovalent construct, comprising or essentially consisting of one amino acid sequence according to claim 1.

50. Nucleic acid or nucleotide sequence, that encodes an amino acid sequence according to claim 1.

51. (canceled)

52. Method for producing an amino acid sequence, said method at least comprising the steps of:
a) expressing, in a suitable host cell or host organism or in another suitable expression system, a nucleic acid or nucleotide sequence according to claim 50, optionally followed by:
b) isolating and/or purifying the amino acid sequence thus obtained.

53. Method for producing an amino acid sequence, said method at least comprising the steps of:
a) cultivating and/or maintaining a host or host cell according to claim 51 under conditions that are such that said host or host cell expresses and/or produces at least one amino acid sequence,
optionally followed by:
b) isolating and/or purifying the amino acid sequence thus obtained.

54. Composition, comprising at least one amino acid sequence according to claim 1.

55. Composition according to claim 54, which is a pharmaceutical composition.

56. Method for the prevention and/or treatment of at least condition or disease characterized by excessive and/or pathological angiogenesis or neovascularization comprising administering, to a subject in need thereof, a pharmaceutically active amount of at least one Use of an amino acid sequence according to claim 1.

57. (canceled)

58. Part or fragment of an amino acid sequence according to claim 1.

59-75. (canceled)

76. Derivative of an amino acid sequence according to claim 1.

77-91. (canceled)

92. Slow-release preparation comprising at least an amino acid sequence according to claim 1.

The application's sequence listing, which the Patent Office published only in electronic form, follows.

SEQUENCE LISTING (680 sequences)

SEQ ID NO: 1 - protein, 102 aa, Artificial
  KERE-class Nanobody
  misc_feature (31)..(35): Xaa = any amino acid
  misc_feature (50)..(54): Xaa = any amino acid
  misc_feature (87)..(91): Xaa = any amino acid
EVQLVESGGGLVQPGGSLRLSCAASGIPFSXXXXXWFRQAPGKQRDSVAXXXXXRFTISRDNAKNTVYLQMNSLKPEDTAVYRCYFXXXXXWGQGTQVTVSS

SEQ ID NO: 2 - protein, 102 aa, Artificial
  KERE-class Nanobody
  misc_feature (31)..(35): Xaa = any amino acid
  misc_feature (50)..(54): Xaa = any amino acid
  misc_feature (87)..(91): Xaa = any amino acid
QVKLEESGGGLVQAGGSLRLSCVGSGRTFSXXXXXWFRLAPGKEREFVAXXXXXRFTISRDTASNRGYLHMNNLTPEDTAVYYCAAXXXXXWGQGTQVTVSS

SEQ ID NO: 3 - protein, 102 aa, Artificial
  KERE-class Nanobody
  misc_feature (31)..(35): Xaa = any amino acid
  misc_feature (50)..(54): Xaa = any amino acid
  misc_feature (87)..(91): Xaa = any amino acid
AVQLVDSGGGLVQAGDSLKLSCALTGGAFTXXXXXWFRQTPGREREFVAXXXXXRFTISRDNAKNMVYLRMNSLIPEDAAVYSCAAXXXXXWGQGTLVTVSS

SEQ ID NO: 4 - protein, 102 aa, Artificial
  KERE-class Nanobody
  misc_feature (31)..(35): Xaa = any amino acid
  misc_feature (50)..(54): Xaa = any amino acid
  misc_feature (87)..(91): Xaa = any amino acid
QVQLVESGGGLVEAGGSLRLSCTASESPFRXXXXXWFRQTSGQEREFVAXXXXXRFTISRDDAKNTVWLHGSTLKPEDTAVYYCAAXXXXXWGQGTQVTVSS

SEQ ID NO: 5 - protein, 102 aa, Artificial
  KERE-class Nanobody
  misc_feature (31)..(35): Xaa = any amino acid
  misc_feature (50)..(54): Xaa = any amino acid
  misc_feature (87)..(91): Xaa = any amino acid
AVQLVESGGGLVQGGGSLRLACAASERIFDXXXXXWYRQGPGNERELVAXXXXXRFTISMDYTKQTVYLHMNSLRPEDTGLYYCKIXXXXXWGQGTQVTVSS

SEQ ID NO: 6 - protein, 102 aa, Artificial
  KERE-class Nanobody
  misc_feature (31)..(35): Xaa = any amino acid
  misc_feature (50)..(54): Xaa = any amino acid
  misc_feature (87)..(91): Xaa = any amino acid
DVKFVESGGGLVQAGGSLRLSCVASGFNFDXXXXXWFRQAPGKEREEVAXXXXXRFTISSEKDKNSVYLQMNSLKPEDTALYICAGXXXXXWGRGTQVTVSS

SEQ ID NO: 7 - protein, 102 aa, Artificial
  KERE-class Nanobody
  misc_feature (31)..(35): Xaa = any amino acid
  misc_feature (50)..(54): Xaa = any amino acid
  misc_feature (87)..(91): Xaa = any amino acid
QVRLAESGGGLVQSGGSLRLSCVASGSTYTXXXXXWYRQYPGKQRALVAXXXXXRFTIARDSTKDTFCLQMNNLKPEDTAVYYCYAXXXXXWGQGTQVTVSS

SEQ ID NO: 8 - protein, 102 aa, Artificial
  KERE-class Nanobody
  misc_feature (31)..(35): Xaa = any amino acid
  misc_feature (50)..(54): Xaa = any amino acid
  misc_feature (87)..(91): Xaa = any amino acid
EVQLVESGGGLVQAGGSLRLSCAASGFTSDXXXXXWFRQAPGKPREGVSXXXXXRFTISTDNAKNTVHLLMNRVNAEDTALYYCAVXXXXXWGRGTRVTVSS

SEQ ID NO: 9 - protein, 102 aa, Artificial
  KERE-class Nanobody
  misc_feature (31)..(35): Xaa = any amino acid
  misc_feature (50)..(54): Xaa = any amino acid
  misc_feature (87)..(91): Xaa = any amino acid
QVQLVESGGGLVQPGGSLRLSCQASGDISTXXXXXWYRQVPGKLREFVAXXXXXRFTISGDNAKRAIYLQMNNLKPDDTAVYYCNRXXXXXWGQGTQVTVSP

SEQ ID NO: 10 - protein, 102 aa, Artificial
  KERE-class Nanobody
  misc_feature (31)..(35): Xaa = any amino acid
  misc_feature (50)..(54): Xaa = any amino acid
  misc_feature (87)..(91): Xaa = any amino acid
QVPVVESGGGLVQAGDSLRLFCAVPSFTSTXXXXXWFRQAPGKEREFVAXXXXXRFTISRNATKNTLTLRMDSLKPEDTAVYYCAAXXXXXWGQGTQVTVSS

SEQ ID NO: 11 - protein, 102 aa, Artificial
  KERE-class Nanobody
  misc_feature (31)..(35): Xaa = any amino acid
  misc_feature (50)..(54): Xaa = any amino acid
  misc_feature (87)..(91): Xaa = any amino acid
EVQLVESGGGLVQAGDSLRLFCTVSGGTASXXXXXWFRQAPGEKREFVAXXXXXRFTIARENAGNMVYLQMNNLKPDDTALYTCAAXXXXXWGRGTQVTVSS

SEQ ID NO: 12 - protein, 102 aa, Artificial
  KERE-class Nanobody
  misc_feature (31)..(35): Xaa = any amino acid
  misc_feature (50)..(54): Xaa = any amino acid
  misc_feature (87)..(91): Xaa = any amino acid
AVQLVESGGDSVQPGDSQTLSCAASGRTNSXXXXXWFRQAPGKERVFLAXXXXXRFTISRDSAKNMMYLQMNNLKPQDTAVYYCAAXXXXXWGQGTQVTVSS

SEQ ID NO: 13 - protein, 102 aa, Artificial
  KERE-class Nanobody
  misc_feature (31)..(35): Xaa = any amino acid
  misc_feature (50)..(54): Xaa = any amino acid
  misc_feature (87)..(91): Xaa = any amino acid
AVQLVESGGGLVQAGGSLRLSCVVSGLTSSXXXXXWFRQTPWQERDFVAXXXXXRFTISRDNYKDTVLLEMNFLKPEDTAIYYCAAXXXXXWGQGTQVTVSS

SEQ ID NO: 14 - protein, 102 aa, Artificial
  KERE-class Nanobody
  misc_feature (31)..(35): Xaa = any amino acid
  misc_feature (50)..(54): Xaa = any amino acid
  misc_feature (87)..(91): Xaa = any amino acid
AVQLVESGGGLVQAGASLRLSCATSTRTLDXXXXXWFRQAPGRDREFVAXXXXXRFTVSRDSAENTVALQMNSLKPEDTAVYYCAAXXXXXWGQGTRVTVSS

SEQ ID NO: 15 - protein, 102 aa, Artificial
  KERE-class Nanobody
  misc_feature (31)..(35): Xaa = any amino acid
  misc_feature (50)..(54): Xaa = any amino acid
  misc_feature (87)..(91): Xaa = any amino acid
QVQLVESGGGLVQPGGSLRLSCTVSRLTAHXXXXXWFRQAPGKEREAVSXXXXXRFTISRDYAGNTAFLQMDSLKPEDTGVYYCATXXXXXWGQGTQVTVSS

SEQ ID NO: 16 - protein, 102 aa, Artificial
  KERE-class Nanobody
  misc_feature (31)..(35): Xaa = any amino acid
  misc_feature (50)..(54): Xaa = any amino acid
  misc_feature (87)..(91): Xaa = any amino acid
EVQLVESGGELVQAGGSLKLSCTASGRNFVXXXXXWFRRAPGKEREFVAXXXXXRFTVSRDNGKNTAYLRMNSLKPEDTADYYCAVXXXXXLGSGTQVTVSS

SEQ ID NO: 17 - protein, 102 aa, Artificial
  GLEW-class Nanobody
  misc_feature (31)..(35): Xaa = any amino acid
  misc_feature (50)..(54): Xaa = any amino acid
  misc_feature (87)..(91): Xaa = any amino acid
AVQLVESGGGLVQPGGSLRLSCAASGFTFSXXXXXWVRQAPGKVLEWVSXXXXXRFTISRDNAKNTLYLQMNSLKPEDTAVYYCVKXXXXXGSQGTQVTVSS

SEQ ID NO: 18 - protein, 102 aa, Artificial
  GLEW-class Nanobody
  misc_feature (31)..(35): Xaa = any amino acid
  misc_feature (50)..(54): Xaa = any amino acid
  misc_feature (87)..(91): Xaa = any amino acid
EVQLVESGGGLVQPGGSLRLSCVCVSSGCTXXXXXWVRQAPGKAEEWVSXXXXXRFKISRDNAKKTLYLQMNSLGPEDTAMYYCQRXXXXXRGQGTQVTVSS

SEQ ID NO: 19 - protein, 102 aa, Artificial
  GLEW-class Nanobody
  misc_feature (31)..(35): Xaa = any amino acid
  misc_feature (50)..(54): Xaa = any amino acid
  misc_feature (87)..(91): Xaa = any amino acid
EVQLVESGGGLALPGGSLTLSCVFSGSTFSXXXXXWVRHTPGKAEEWVSXXXXXRFTISRDNAKNTLYLEMNSLSPEDTAMYYCGRXXXXXRSKGIQVTVSS

SEQ ID NO: 20 - protein, 102 aa, Artificial
  P,R,S 103-class Nanobody
  misc_feature (31)..(35): Xaa = any amino acid
  misc_feature (50)..(54): Xaa = any amino acid
  misc_feature (87)..(91): Xaa = any amino acid
AVQLVESGGGLVQAGGSLRLSCAASGRTFSXXXXXWFRQAPGKEREFVAXXXXXRFTISRDNAKNTVYLQMNSLKPEDTAVYYCAAXXXXXRGQGTQVTVSS

SEQ ID NO: 21 - protein, 102 aa, Artificial
  P,R,S 103-class Nanobody
  misc_feature (31)..(35): Xaa = any amino acid
  misc_feature (50)..(54): Xaa = any amino acid
  misc_feature (87)..(91): Xaa = any amino acid
DVQLVESGGDLVQPGGSLRLSCAASGFSFDXXXXXWLRQTPGKGLEWVGXXXXXRFTISRDNAKNMLYLHLNNLKSEDTAVYYCRRXXXXXLGQGTQVTVSS

SEQ ID NO: 22 - protein, 102 aa, Artificial; identical to SEQ ID NO: 18
  P,R,S 103-class Nanobody
  misc_feature (31)..(35): Xaa = any amino acid
  misc_feature (50)..(54): Xaa = any amino acid
  misc_feature (87)..(91): Xaa = any amino acid

SEQ ID NO: 23 - protein, 30 aa, Artificial
  KERE-class Nanobody FW1 sequence
QVQRVESGGGLVQAGGSLRLSCAASGRTSS

SEQ ID NO: 24 - protein, 30 aa, Artificial
  KERE-class Nanobody FW1 sequence
QVQLVESGGGLVQTGDSLSLSCSASGRTFS

SEQ ID NO: 25 - protein, 30 aa, Artificial
  KERE-class Nanobody FW1 sequence
QVKLEESGGGLVQAGDSLRLSCAATGRAFG

SEQ ID NO: 26 - protein, 30 aa, Artificial
  KERE-class Nanobody FW1 sequence
AVQLVESGGGLVQPGESLGLSCVASGRDFV

SEQ ID NO: 27 - protein, 30 aa, Artificial
  KERE-class Nanobody FW1 sequence
EVQLVESGGGLVQAGGSLRLSCEVLGRTAG

SEQ ID NO: 28 - protein, 30 aa, Artificial
  KERE-class Nanobody FW1 sequence
QVQLVESGGGWVQPGGSLRLSCAASETILS

SEQ ID NO: 29 - protein, 30 aa, Artificial
  KERE-class Nanobody FW1 sequence
QVQLVESGGGTVQPGGSLNLSCVASGNTFN

SEQ ID NO: 30 - protein, 30 aa, Artificial
  KERE-class Nanobody FW1 sequence
EVQLVESGGGLAQPGGSLQLSCSAPGFTLD

SEQ ID NO: 31 - protein, 30 aa, Artificial
  KERE-class Nanobody FW1 sequence
AQELEESGGGLVQAGGSLRLSCAASGRTFN

SEQ ID NO: 32 - protein, 22 aa, Artificial
  KERE-class Nanobody FW1 sequence
VESGGGLVQPGGSLRLSCAASG

SEQ ID NO: 33 - protein, 22 aa, Artificial
  KERE-class Nanobody FW1 sequence
VDSGGGLVQAGDSLKLSCALTG

SEQ ID NO: 34 - protein, 22 aa, Artificial
  KERE-class Nanobody FW1 sequence
VDSGGGLVQAGDSLRLSCAASG

SEQ ID NO: 35 - protein, 22 aa, Artificial
  KERE-class Nanobody FW1 sequence
VDSGGGLVEAGGSLRLSCQVSE

SEQ ID NO: 36 - protein, 22 aa, Artificial
  KERE-class Nanobody FW1 sequence
QDSGGGSVQAGGSLKLSCAASG

SEQ ID NO: 37 - protein, 22 aa, Artificial
  KERE-class Nanobody FW1 sequence
VQSGGRLVQAGDSLRLSCAASE

SEQ ID NO: 38 - protein, 22 aa, Artificial
  KERE-class Nanobody FW1 sequence
VESGGTLVQSGDSLKLSCASST

SEQ ID NO: 39 - protein, 22 aa, Artificial
  KERE-class Nanobody FW1 sequence
MESGGDSVQSGGSLTLSCVASG

SEQ ID NO: 40 - protein, 22 aa, Artificial
  KERE-class Nanobody FW1 sequence
QASGGGLVQAGGSLRLSCSASV

SEQ ID NO: 41 - protein, 14 aa, Artificial
  KERE-class Nanobody FW2 sequence
WFRQAPGKEREFVA

SEQ ID NO: 42 - protein, 14 aa, Artificial
  KERE-class Nanobody FW2 sequence
WFRQTPGREREFVA

SEQ ID NO: 43 - protein, 14 aa, Artificial
  KERE-class Nanobody FW2 sequence
WYRQAPGKQREMVA

SEQ ID NO: 44 - protein, 14 aa, Artificial
  KERE-class Nanobody FW2 sequence
WYRQGPGKQRELVA

SEQ ID NO: 45 - protein, 14 aa, Artificial
  KERE-class Nanobody FW2 sequence
WIRQAPGKEREGVS

SEQ ID NO: 46 - protein, 14 aa, Artificial
  KERE-class Nanobody FW2 sequence
WFREAPGKEREGIS

SEQ ID NO: 47 - protein, 14 aa, Artificial
  KERE-class Nanobody FW2 sequence
WYRQAPGKERDLVA

SEQ ID NO: 48 - protein, 14 aa, Artificial
  KERE-class Nanobody FW2 sequence
WFRQAPGKQREEVS

SEQ ID NO: 49 - protein, 14 aa, Artificial
  KERE-class Nanobody FW2 sequence
WFRQPPGKVREFVG

SEQ ID NO: 50 - protein, 32 aa, Artificial
  KERE-class Nanobody FW3 sequence
RFTISRDNAKNTVYLQMNSLKPEDTAVYRCYF

SEQ ID NO: 51 - protein, 32 aa, Artificial
  KERE-class Nanobody FW3 sequence
RFAISRDNNKNTGYLQMNSLEPEDTAVYYCAA

SEQ ID NO: 52 - protein, 32 aa, Artificial
  KERE-class Nanobody FW3 sequence
RFTVARNNAKNTVNLEMNSLKPEDTAVYYCAA

SEQ ID NO: 53 - protein, 32 aa, Artificial
  KERE-class Nanobody FW3 sequence
RFTISRDIAKNTVDLLMNNLEPEDTAVYYCAA

SEQ ID NO: 54 - protein, 32 aa, Artificial
  KERE-class Nanobody FW3 sequence
RLTISRDNAVDTMYLQMNSLKPEDTAVYYCAA

SEQ ID NO: 55 - protein, 32 aa, Artificial
  KERE-class Nanobody FW3 sequence
RFTISRDNAKNTVYLQMDNVKPEDTAIYYCAA

SEQ ID NO: 56 - protein, 32 aa, Artificial
  KERE-class Nanobody FW3 sequence
RFTISKDSGKNTVYLQMTSLKPEDTAVYYCAT

SEQ ID NO: 57 - protein, 32 aa, Artificial
  KERE-class Nanobody FW3 sequence
RFTISRDSAKNMMYLQMNNLKPQDTAVYYCAA

SEQ ID NO: 58 - protein, 32 aa, Artificial
  KERE-class Nanobody FW3 sequence
RFTISRENDKSTVYLQLNSLKPEDTAVYYCAA

SEQ ID NO: 59 - protein, 32 aa, Artificial
  KERE-class Nanobody FW3 sequence
RFTISRDYAGNTAYLQMNSLKPEDTGVYYCAT

SEQ ID NO: 60 - protein, 11 aa, Artificial
  KERE-class Nanobody FW4 sequence
WGQGTQVTVSS

SEQ ID NO: 61 - protein, 11 aa, Artificial
  KERE-class Nanobody FW4 sequence
WGKGTLVTVSS

SEQ ID NO: 62 - protein, 11 aa, Artificial
  KERE-class Nanobody FW4 sequence
RGQGTRVTVSS

SEQ ID NO: 63 - protein, 11 aa, Artificial
  KERE-class Nanobody FW4 sequence
WGLGTQVTISS

SEQ ID NO: 64 - protein, 30 aa, Artificial
  GLEW-class Nanobody FW1 sequence
QVQLVESGGGLVQPGGSLRLSCAASGFTFS

SEQ ID NO: 65 - protein, 30 aa, Artificial
  GLEW-class Nanobody FW1 sequence
EVHLVESGGGLVRPGGSLRLSCAAFGFIFK

SEQ ID NO: 66 - protein, 30 aa, Artificial
  GLEW-class Nanobody FW1 sequence
QVKLEESGGGLAQPGGSLRLSCVASGFTFS

SEQ ID NO: 67 - protein, 30 aa, Artificial
  GLEW-class Nanobody FW1 sequence
EVQLVESGGGLVQPGGSLRLSCVCVSSGCT

SEQ ID NO: 68 - protein, 30 aa, Artificial
  GLEW-class Nanobody FW1 sequence
EVQLVESGGGLALPGGSLTLSCVFSGSTFS

SEQ ID NO: 69 - protein, 22 aa, Artificial
  GLEW-class Nanobody FW1 sequence
VESGGGLVQPGGSLRLSCAASG

SEQ ID NO: 70 - protein, 22 aa, Artificial
  GLEW-class Nanobody FW1 sequence
EESGGGLAQPGGSLRLSCVASG

SEQ ID NO: 71 - protein, 22 aa, Artificial
  GLEW-class Nanobody FW1 sequence
VESGGGLALPGGSLTLSCVFSG

SEQ ID NO: 72 - protein, 14 aa, Artificial
  GLEW-class Nanobody FW2 sequence
WVRQAPGKVLEWVS

SEQ ID NO: 73 - protein, 14 aa, Artificial
  GLEW-class Nanobody FW2 sequence
WVRRPPGKGLEWVS

SEQ ID NO: 74 - protein, 14 aa, Artificial
  GLEW-class Nanobody FW2 sequence
WVRQAPGMGLEWVS

SEQ ID NO: 75 - protein, 14 aa, Artificial
  GLEW-class Nanobody FW2 sequence
WVRQAPGKEPEWVS

SEQ ID NO: 76 - protein, 14 aa, Artificial
  GLEW-class Nanobody FW2 sequence
WVRQAPGKDQEWVS

SEQ ID NO: 77 - protein, 14 aa, Artificial
  GLEW-class Nanobody FW2 sequence
WVRQAPGKAEEWVS

SEQ ID NO: 78 - protein, 14 aa, Artificial
  GLEW-class Nanobody FW2 sequence
WVRQAPGKGLEWVA

SEQ ID NO: 79 - protein, 14 aa, Artificial
  GLEW-class Nanobody FW2 sequence
WVRQAPGRATEWVS

SEQ ID NO: 80 - protein, 32 aa, Artificial
  GLEW-class Nanobody FW3 sequence
RFTISRDNAKNTLYLQMNSLKPEDTAVYYCVK

SEQ ID NO: 81 - protein, 32 aa, Artificial
  GLEW-class Nanobody FW3 sequence
RFTISRDNARNTLYLQMDSLIPEDTALYYCAR

SEQ ID NO: 82 - protein, 32 aa, Artificial
  GLEW-class Nanobody FW3 sequence
RFTSSRDNAKSTLYLQMNDLKPEDTALYYCAR

SEQ ID NO: 83 - protein, 32 aa, Artificial
  GLEW-class Nanobody FW3 sequence
RFIISRDNAKNTLYLQMNSLGPEDTAMYYCQR

SEQ ID NO: 84 - protein, 32 aa, Artificial
  GLEW-class Nanobody FW3 sequence
RFTASRDNAKNTLYLQMNSLKSEDTARYYCAR

SEQ ID NO: 85 - protein, 32 aa, Artificial
  GLEW-class Nanobody FW3 sequence
RFTISRDNAKNTLYLQMDDLQSEDTAMYYCGR

SEQ ID NO: 86 - protein, 11 aa, Artificial
  GLEW-class Nanobody FW4 sequence
GSQGTQVTVSS

SEQ ID NO: 87 - protein, 11 aa, Artificial
  GLEW-class Nanobody FW4 sequence
LRGGTQVTVSS

SEQ ID NO: 88 - protein, 11 aa, Artificial
  GLEW-class Nanobody FW4 sequence
RGQGTLVTVSS

SEQ ID NO: 89 - protein, 11 aa, Artificial
  GLEW-class Nanobody FW4 sequence
RSRGIQVTVSS

SEQ ID NO: 90 - protein, 11 aa, Artificial
  GLEW-class Nanobody FW4 sequence
WGKGTQVTVSS

SEQ ID NO: 91 - protein, 11 aa, Artificial
  GLEW-class Nanobody FW4 sequence
WGQGTQVTVSS

SEQ ID NO: 92 - protein, 30 aa, Artificial
  P,R,S 103-class Nanobody FW1 sequence
AVQLVESGGGLVQAGGSLRLSCAASGRTFS

SEQ ID NO: 93 - protein, 30 aa, Artificial
  P,R,S 103-class Nanobody FW1 sequence
QVQLQESGGGMVQPGGSLRLSCAASGFDFG

SEQ ID NO: 94 - protein, 30 aa, Artificial; identical to SEQ ID NO: 65
  P,R,S 103-class Nanobody FW1 sequence

SEQ ID NO: 95 - protein, 30 aa, Artificial
  P,R,S 103-class Nanobody FW1 sequence
QVQLAESGGGLVQPGGSLKLSCAASRTIVS

SEQ ID NO: 96 - protein, 30 aa, Artificial
  P,R,S 103-class Nanobody FW1 sequence
QEHLVESGGGLVDIGGSLRLSCAASERIFS

SEQ ID NO: 97 - protein, 30 aa, Artificial; identical to SEQ ID NO: 66
  P,R,S 103-class Nanobody FW1 sequence

SEQ ID NO: 98 - protein, 30 aa, Artificial; identical to SEQ ID NO: 67
  P,R,S 103-class Nanobody FW1 sequence

SEQ ID NO: 99 - protein, 30 aa, Artificial; identical to SEQ ID NO: 68
  P,R,S 103-class Nanobody FW1 sequence

SEQ ID NO: 100 - protein, 22 aa, Artificial
  P,R,S 103-class Nanobody FW1 sequence
VESGGGLVQAGGSLRLSCAASG

SEQ ID NO: 101 - protein, 22 aa, Artificial
  P,R,S 103-class Nanobody FW1 sequence
AESGGGLVQPGGSLKLSCAASR

SEQ ID NO: 102 - protein, 14 aa, Artificial
  P,R,S 103-class Nanobody FW2 sequence
WFRQAPGKEREFVA

SEQ ID NO: 103 - protein, 14 aa, Artificial
  P,R,S 103-class Nanobody FW2 sequence
WVRQAPGKVLEWVS

SEQ ID NO: 104 - protein, 14 aa, Artificial
  P,R,S 103-class Nanobody FW2 sequence
WVRRPPGKGLEWVS

SEQ ID NO: 105 - protein, 14 aa, Artificial
  P,R,S 103-class Nanobody FW2 sequence
WIRQAPGKEREGVS

SEQ ID NO: 106 - protein, 14 aa, Artificial
  P,R,S 103-class Nanobody FW2 sequence
WVRQYPGKEPEWVS

SEQ ID NO: 107 - protein, 14 aa, Artificial
  P,R,S 103-class Nanobody FW2 sequence
WFRQPPGKEHEFVA

SEQ ID NO: 108 - protein, 14 aa, Artificial
  P,R,S 103-class Nanobody FW2 sequence
WYRQAPGKRTELVA

SEQ ID NO: 109 - protein, 14 aa, Artificial
  P,R,S 103-class Nanobody FW2 sequence
WLRQAPGQGLEWVS

SEQ ID NO: 110 - protein, 14 aa, Artificial
  P,R,S 103-class Nanobody FW2 sequence
WLRQTPGKGLEWVG

SEQ ID NO: 111 - protein, 14 aa, Artificial
  P,R,S 103-class Nanobody FW2 sequence
WVRQAPGKAEEFVS

SEQ ID NO: 112 - protein, 32 aa, Artificial
  P,R,S 103-class Nanobody FW3 sequence
RFTISRDNAKNTVYLQMNSLKPEDTAVYYCAA

SEQ ID NO: 113 - protein, 32 aa, Artificial; identical to SEQ ID NO: 81
  P,R,S 103-class Nanobody FW3 sequence

SEQ ID NO: 114 - protein, 32 aa, Artificial
  P,R,S 103-class Nanobody FW3 sequence
RFTISRDNAKNEMYLQMNNLKTEDTGVYWCGA

SEQ ID NO: 115 - protein, 32 aa, Artificial
  P,R,S 103-class Nanobody FW3 sequence
RFTISSDSNRNMIYLQMNNLKPEDTAVYYCAA

SEQ ID NO: 116 - protein, 32 aa, Artificial
  P,R,S 103-class Nanobody FW3 sequence
RFTISRDNAKNMLYLHLNNLKSEDTAVYYCRR

SEQ ID NO: 117 - protein, 32 aa, Artificial
  P,R,S 103-class Nanobody FW3 sequence
RFTISRDNAKKTVYLRLNSLNPEDTAVYSCNL

SEQ ID NO: 118 - protein, 32 aa, Artificial
  P,R,S 103-class Nanobody FW3 sequence
RFKISRDNAKKTLYLQMNSLGPEDTAMYYCQR

SEQ ID NO: 119 - protein, 32 aa, Artificial
  P,R,S 103-class Nanobody FW3 sequence
RFTVSRDNGKNTAYLRMNSLKPEDTADYYCAV

SEQ ID NO: 120 - protein, 11 aa, Artificial
  P,R,S 103-class Nanobody FW4 sequence
RGQGTQVTVSS

SEQ ID NO: 121 - protein, 11 aa, Artificial
  P,R,S 103-class Nanobody FW4 sequence
LRGGTQVTVSS

SEQ ID NO: 122 - protein, 11 aa, Artificial
  P,R,S 103-class Nanobody FW4 sequence
GNKGTLVTVSS

SEQ ID NO: 123 - protein, 11 aa, Artificial
  P,R,S 103-class Nanobody FW4 sequence
SSPGTQVTVSS

SEQ ID NO: 124 - protein, 11 aa, Artificial
  P,R,S 103-class Nanobody FW4 sequence
SSQGTLVTVSS

SEQ ID NO: 125 - protein, 11 aa, Artificial
  P,R,S 103-class Nanobody FW4 sequence
RSRGIQVTVSS

SEQ ID NO: 126 - protein, 30 aa, Artificial
  FR1 sequence
EVQLVESGGGLVQAGGSLRLSCAASGRTFS

SEQ ID NO: 127 - protein, 30 aa, Artificial
  FR1 sequence
KVQLVESGGGLVQAGGSLRLSCAASGRSFS

SEQ ID NO: 128 - protein, 30 aa, Artificial
  FR1 sequence
EVQLVESGGGLVQVGGSLRLSCAASGRTFS

SEQ ID NO: 129 - protein, 30 aa, Artificial
  FR1 sequence
EVQLVESGGGLVQPGGSLRLACAVSGFTMS

SEQ ID NO: 130 - protein, 30 aa, Artificial
  FR1 sequence
EVQLVESGGGLVQPGGSLRLSCAASGFTFS

SEQ ID NO: 131 - protein, 30 aa, Artificial; identical to SEQ ID NO: 130
  FR1 sequence

SEQ ID NO: 132 - protein, 30 aa, Artificial
  FR1 sequence
EVQLVESGGDLVQPGGSLRLSCAASGFTFS

SEQ ID NO: 133 - protein, 30 aa, Artificial
  FR1 sequence
EVQLVESGGGLVQPGGSLRLSCAASGFTVS

SEQ ID NO: 134 - protein, 30 aa, Artificial
  FR1 sequence
EVQLVESGGGLVQAGSSLRLSCVASGRSVS

SEQ ID NO: 135 - protein, 30 aa, Artificial
  FR1 sequence
EVQLVESGGGLVQPGGSLRLSCAASVRTFS

SEQ ID NO: 136 - protein, 30 aa, Artificial
  FR1 sequence
EVQLVESGGGLVQAGGSLRLSCVASGRTFG

SEQ ID NO: 137 - protein, 30 aa, Artificial
  FR1 sequence
EVQLVESGGGLVQAGGSLRLSCAASARTFS

SEQ ID NO: 138 - protein, 30 aa, Artificial
  FR1 sequence
EVQLVESGGGLVQAGDSLRLSCAASGLTFS

SEQ ID NO: 139 - protein, 30 aa, Artificial
  FR1 sequence
EVQLVESGGGLVQSGGSLRLSCAASGLAFS

SEQ ID NO: 140 - protein, 30 aa, Artificial
  FR1 sequence
EVQLVESGGGLVQAGVSLRLSCAASGRTFG

SEQ ID NO: 141 - protein, 30 aa, Artificial
  FR1 sequence
EVQLVESGGRLVQAGGSLRLSCAASGGIFS

SEQ ID NO: 142 - protein, 30 aa, Artificial
  FR1 sequence
EVQLVESGGGLVQAGASLRLSCAASGRTFS

SEQ ID NO: 143 - protein, 30 aa, Artificial
  FR1 sequence
EVQLVESGGRLVQAGDSLRLSCAASGGTVR

SEQ ID NO: 144 - protein, 30 aa, Artificial
  FR1 sequence
EVQLVESGGGLVQAGGSLRLSCAASGRTIS

SEQ ID NO: 145 - protein, 30 aa, Artificial
  FR1 sequence
EVQLVESGGGLVQAGGSLRLSCAPSGRDIS

SEQ ID NO: 146 - protein, 30 aa, Artificial
  FR1 sequence
EVQLVESGGGLVQAGGSLRLSCTASGRALD

SEQ ID NO: 147 - protein, 30 aa, Artificial
  FR1 sequence
KVQLVESGGGLVQAGGSLRLSCAASGRALD

SEQ ID NO: 148 - protein, 30 aa, Artificial; identical to SEQ ID NO: 146
  FR1 sequence

SEQ ID NO: 149 - protein, 30 aa, Artificial
  FR1 sequence
EVQLVESGGGLVQAGGSLRLSCAASGRALD

SEQ ID NO: 150 - protein, 30 aa, Artificial; identical to SEQ ID NO: 149
  FR1 sequence

SEQ ID NO: 151 - protein, 30 aa, Artificial
  FR1 sequence
EVQLVESGGGLVQPGGSLRLSCAASGRALD

SEQ ID NO: 152 - protein, 30 aa, Artificial
  FR1 sequence
EVHLVESGGGLVQAGGSLRLSCAASGRALD

SEQ ID NO: 153 - protein, 30 aa, Artificial
  FR1 sequence
EVQLVESGGGLVQPGGSLRLSCAASGFTLD

SEQ ID NO: 154 - protein, 30 aa, Artificial; identical to SEQ ID NO: 153
  FR1 sequence

SEQ ID NO: 155 - protein, 30 aa, Artificial; identical to SEQ ID NO: 126
  FR1 sequence

SEQ ID NO: 156 - protein, 30 aa, Artificial
  FR1 sequence
EVPMVESGGGLVQAGGSLRLSCAASGRTFS

SEQ ID NO: 157 - protein, 30 aa, Artificial; identical to SEQ ID NO: 126
  FR1 sequence

SEQ ID NO: 158 - protein, 30 aa, Artificial; identical to SEQ ID NO: 126
  FR1 sequence

SEQ ID NO: 159 - protein, 30 aa, Artificial; identical to SEQ ID NO: 126
  FR1 sequence

SEQ ID NO: 160 - protein, 30 aa, Artificial
  FR1 sequence
EVQLVESGGGLVQPGGSLRLSCAASGRALS

SEQ ID NO: 161 - protein, 30 aa, Artificial
  FR1 sequence
EVQLVESGGGLVQAGGALRLSCAASGRTFE

SEQ ID NO: 162 - protein, 30 aa, Artificial; identical to SEQ ID NO: 161
  FR1 sequence

SEQ ID NO: 163 - protein, 30 aa, Artificial; identical to SEQ ID NO: 161
  FR1 sequence

SEQ ID NO: 164 - protein, 30 aa, Artificial
  FR1 sequence
EVQLVESGGGLVHAGGALRLSCAASGRAFE

SEQ ID NO: 165 - protein, 30 aa, Artificial
  FR1 sequence
EVQLVESGGGLVQAGGALRPSCAASGRTFE

SEQ ID NO: 166 - protein, 30 aa, Artificial
  FR1 sequence
EVQLVESGGGLVQAGGALRLSCAVSGRTFE

SEQ ID NO: 167 - protein, 30 aa, Artificial; identical to SEQ ID NO: 161
  FR1 sequence

SEQ ID NO: 168 - protein, 30 aa, Artificial
  FR1 sequence
EVQLMESGGGLVQAGGSLRLSCAVSGRTFE

SEQ ID NO: 169 - protein, 30 aa, Artificial
  FR1 sequence
EVQLVESGGGSVQAGGALRLSCAVSGRTFE

SEQ ID NO: 170 - protein, 30 aa, Artificial
  FR1 sequence
EVQLVESGGGLVQTGGSLRLSCAASGRTFG

SEQ ID NO: 171 - protein, 5 aa, Artificial
  Xaa = any amino acid sequence
SLAMG

SEQ ID NO: 172 - protein, 5 aa, Artificial
  Xaa = any amino acid sequence
DNVMG

SEQ ID NO: 173 - protein, 5 aa, Artificial
  Xaa = any amino acid sequence
SARMG

SEQ ID NO: 174 - protein, 5 aa, Artificial
  Xaa = any amino acid sequence
SSWMY

SEQ ID NO: 175 - protein, 5 aa, Artificial
  Xaa = any amino acid sequence
SYSMI

SEQ ID NO: 176 - protein, 5 aa, Artificial
  Xaa = any amino acid sequence
NYWMY

SEQ ID NO: 177 - protein, 5 aa, Artificial
  Xaa = any amino acid sequence
RYEMS

SEQ ID NO: 178 - protein, 5 aa, Artificial
  Xaa = any amino acid sequence
SYTMY

SEQ ID NO: 179 - protein, 5 aa, Artificial
  Xaa = any amino acid sequence
TYGMA

SEQ ID NO: 180 - protein, 5 aa, Artificial
  Xaa = any amino acid sequence
NYFMG

SEQ ID NO: 181 - protein, 5 aa, Artificial
  Xaa = any amino acid sequence
SYDMG

SEQ ID NO: 182 - protein, 5 aa, Artificial
  Xaa = any amino acid sequence
SYAMS

SEQ ID NO: 183 - protein, 5 aa, Artificial
  Xaa = any amino acid sequence
AYTMG

SEQ ID NO: 184 - protein, 5 aa, Artificial
  Xaa = any amino acid sequence
TYAMG

SEQ ID NO: 185 - protein, 5 aa, Artificial
  Xaa = any amino acid sequence
NYNMG

SEQ ID NO: 186 - protein, 5 aa, Artificial
  Xaa = any amino acid sequence
RYNMG

SEQ ID NO: 187 - protein, 5 aa, Artificial
  Xaa = any amino acid sequence
SYDMG

SEQ ID NO: 188 - protein, 5 aa, Artificial
  Xaa = any amino acid sequence
NYAMG

SEQ ID NO: 189 - protein, 5 aa, Artificial
  Xaa = any amino acid sequence
SYTMG

SEQ ID NO: 190 - protein, 5 aa, Artificial
  Xaa = any amino acid sequence
SYIMG

SEQ ID NO: 191 - protein, 5 aa, Artificial
  Xaa = any amino acid sequence
TYTVT

SEQ ID NO: 192 - protein, 5 aa, Artificial
  Xaa = any amino acid sequence
TYTVT

SEQ ID NO: 193 - protein, 5 aa, Artificial
  Xaa = any amino acid sequence
TYTVT

SEQ ID NO: 194 - protein, 5 aa, Artificial
  Xaa = any amino acid sequence
TYTVT

SEQ ID NO: 195 - protein, 5 aa, Artificial
  Xaa = any amino acid sequence
TYTVT

SEQ ID NO: 196 - protein, 5 aa, Artificial
  Xaa = any amino acid sequence
TYTVT

SEQ ID NO: 197 - protein, 5 aa, Artificial
  Xaa = any amino acid sequence
TYTVT

SEQ ID NO: 198 - protein, 5 aa, Artificial
  Xaa = any amino acid sequence
YYGIG

SEQ ID NO: 199 - protein, 5 aa, Artificial
  Xaa = any amino acid sequence
YYGIG

SEQ ID NO: 200 - protein, 5 aa, Artificial
  Xaa = any amino acid sequence
GVDVA

SEQ ID NO: 201 - protein, 5 aa, Artificial
  Xaa = any amino acid sequence
GVDVA

SEQ ID NO: 202 - protein, 5 aa, Artificial
  Xaa = any amino acid sequence
GVDVA

SEQ ID NO: 203 - protein, 5 aa, Artificial
  Xaa = any amino acid sequence
GVDVA

SEQ ID NO: 204 - protein, 5 aa, Artificial
  Xaa = any amino acid sequence
GVDVA

SEQ ID NO: 205 - protein, 5 aa, Artificial
  Xaa = any amino acid sequence
SYSVG

SEQ ID NO: 206 - protein, 5 aa, Artificial
  Xaa = any amino acid sequence
TYRMG

SEQ ID NO: 207 - protein, 5 aa, Artificial
  Xaa = any amino acid sequence
TYRMG

SEQ ID NO: 208 - protein, 5 aa, Artificial
  Xaa = any amino acid sequence
TYRMG

SEQ ID NO: 209 - protein, 5 aa, Artificial
  Xaa = any amino acid sequence
TYRMG

SEQ ID NO: 210 - protein, 5 aa, Artificial
  Xaa = any amino acid sequence
TYRMG

SEQ ID NO: 211 - protein, 5 aa, Artificial
  Xaa = any amino acid sequence
SYRMG

SEQ ID NO: 212 - protein, 5 aa, Artificial
  Xaa = any amino acid sequence
TYRMG

SEQ ID NO: 213 - protein, 5 aa, Artificial
  Xaa = any amino acid sequence
SYRMG

SEQ ID NO: 214 - protein, 5 aa, Artificial
  Xaa = any amino acid sequence
SYRMG

SEQ ID NO: 215 - protein, 5 aa, Artificial
  Xaa = any amino acid sequence
TYAMA

SEQ ID NO: 216 - protein, 14 aa, Artificial
  FR2 sequence
WFRQAPGKDREFVV

SEQ ID NO: 217 - protein, 14 aa, Artificial
  FR2 sequence
WFRQAAGKEREFVA

SEQ ID NO: 218 - protein, 14 aa, Artificial
  FR2 sequence
WFRQCPGKEREFVA

SEQ ID NO: 219 - protein, 14 aa, Artificial
  FR2 sequence
WVRQAPGKGLEWVS

SEQ ID NO: 220 - protein, 14 aa, Artificial
  FR2 sequence
WVRQAPGKGLEWVS

SEQ ID NO: 221 - protein, 14 aa, Artificial
  FR2 sequence
WLRQAPGKGLESVS

SEQ ID NO: 222 - protein, 14 aa, Artificial
  FR2 sequence
WVRQAPGKGLEWVS

SEQ ID NO: 223 - protein, 14 aa, Artificial
  FR2 sequence
WARQAPGKELEWVS

SEQ ID NO: 224 - protein, 14 aa, Artificial
  FR2 sequence
WFRQAPGKEREFVA

SEQ ID NO: 225 - protein, 14 aa, Artificial
  FR2 sequence
WFRQAPGKEREFVA

SEQ ID NO: 226 - protein, 14 aa, Artificial
  FR2 sequence
WFRQAPGKEREFVA

SEQ ID NO: 227 - protein, 14 aa, Artificial
  FR2 sequence
WFRQAPGKERDFVA

SEQ ID NO: 228 - protein, 14 aa, Artificial
  FR2 sequence
WFRQAPGKEREFVS

SEQ ID NO: 229 - protein, 14 aa, Artificial
  FR2 sequence
WFRQAPGKDREMVI

SEQ ID NO: 230 - protein, 14 aa, Artificial
  FR2 sequence
WFRQAQGKDRELVA

SEQ ID NO: 231 - protein, 14 aa, Artificial
  FR2 sequence
WFRQAPGKEREFVA

SEQ ID NO: 232 - protein, 14 aa, Artificial
  FR2 sequence
WFRQAPGKERALVA

SEQ ID NO: 233 - protein, 14 aa, Artificial
  FR2 sequence
WFRQAPGQEREILS

SEQ ID NO: 234 - protein, 14 aa, Artificial
  FR2 sequence
WFRQAPGKEREFVA

SEQ ID NO: 235 - protein, 14 aa, Artificial
  FR2 sequence
WFRQAPGKEREFTA

SEQ ID NO: 236 - protein, 14 aa, Artificial
  FR2 sequence
WFRQTPGKEREFVA

SEQ ID NO: 237 - protein, 14 aa, Artificial
  FR2 sequence
WFRQTPGKEREFVA

SEQ ID NO: 238 - protein, 14 aa, Artificial
  FR2 sequence
WFRQTPGKEREFVA

SEQ ID NO: 239 - protein, 14 aa, Artificial
  FR2 sequence
WFRQTPGKEREFVA

SEQ ID NO: 240 - protein, 14 aa, Artificial
  FR2 sequence
WFRQTPGKGREFLA

SEQ ID NO: 241 - protein, 14 aa, Artificial
  FR2 sequence
WFRQTPGKTREFVA

SEQ ID NO: 242 - protein, 14 aa, Artificial
  FR2 sequence
WFRQTPGKTREFVA

SEQ ID NO: 243 - protein, 14 aa, Artificial
  FR2 sequence
WFRQAPGKEREWVS

SEQ ID NO: 244 - protein, 14 aa, Artificial
  FR2 sequence
WFRQAPGKEREWVS

SEQ ID NO: 245 - protein, 14 aa, Artificial
  FR2 sequence
WFRQAPGKEREFVA

SEQ ID NO: 246 - protein, 14 aa, Artificial
  FR2 sequence
WFRQAPGKEREFVA

SEQ ID NO: 247 - protein, 14 aa, Artificial
  FR2 sequence
WFRQATGKEREFVA

SEQ ID NO: 248 - protein, 14 aa, Artificial
  FR2 sequence
WFRQAPGKEREFVA

SEQ ID NO: 249 - protein, 14 aa, Artificial
  FR2 sequence
WFRQAPGKEREFVA

SEQ ID NO: 250 - protein, 14 aa, Artificial
  FR2 sequence
WFRQAPGKEREFVT

SEQ ID NO: 251 - protein, 14 aa, Artificial
  FR2 sequence
WFRQAPGKEREFVA

SEQ ID NO: 252 - protein, 14 aa, Artificial
  FR2 sequence
WFRQAPGKEREFVA

SEQ ID NO: 253 - protein, 14 aa, Artificial
  FR2 sequence
WFRQAPGKEREFVA

SEQ ID NO: 254 - protein, 14 aa, Artificial
  FR2 sequence
WFRQAPGKEREFVA

SEQ ID NO: 255 - protein, 14 aa, Artificial
  FR2 sequence
WFRQAPGKEREFVA

SEQ ID NO: 256 - protein, 14 aa, Artificial
  FR2 sequence
WFRQAPGKEREFVS

SEQ ID NO: 257 - protein, 14 aa, Artificial
  FR2 sequence
WFRQAPGKEREFVA

SEQ ID NO: 258 - protein, 14 aa, Artificial
  FR2 sequence
WFRQAPGKEREFVS

SEQ ID NO: 259 - protein, 14 aa, Artificial
  FR2 sequence
WFRQAPGKEREFVS

SEQ ID NO: 260 - protein, 14 aa, Artificial
  FR2 sequence
WFRQSPKNEREFVA

SEQ ID NO: 261 - protein, 17 aa, Artificial
  Xaa = any amino acid sequence
VVSGSGGTTKYADSVKG

SEQ ID NO: 262 - protein, 17 aa, Artificial
  Xaa = any amino acid sequence
HISRGGSRTEYADSVKG

SEQ ID NO: 263 - protein, 17 aa, Artificial
  Xaa = any amino acid sequence
AISWSNDITYYEDSVKG

SEQ ID NO: 264 - protein, 17 aa, Artificial
  Xaa = any amino acid sequence
SISPGGLFPYYVDSVKG

SEQ ID NO: 265 - protein, 17 aa, Artificial
  Xaa = any amino acid sequence
EISSGGGWTSYADSVKG

SEQ ID NO: 266 - protein, 17 aa, Artificial
  Xaa = any amino acid sequence
SINTGGARTFYADSVKG

SEQ ID NO: 267 - protein, 17 aa, Artificial
  Xaa = any amino acid sequence
GISTGGGWRTYADSVKG

SEQ ID NO: 268 - protein, 17 aa, Artificial
  Xaa = any amino acid sequence
IIFTNGEGTYYSDSVKG

SEQ ID NO: 269 - protein, 16 aa, Artificial
  Xaa = any amino acid sequence
INRSTGTIYYADSVKG

SEQ ID NO: 270 - protein, 15 aa, Artificial
  Xaa = any amino acid sequence
TIGWSGTDYADSVKG

SEQ ID NO: 271 - protein, 17 aa, Artificial
  Xaa = any amino acid sequence
AISTGGGWRRYADSVKG

SEQ ID NO: 272 - protein, 17 aa, Artificial
  Xaa = any amino acid sequence
VINWSGGSTYYADSVKG

SEQ ID NO: 273 - protein, 17 aa, Artificial
  Xaa = any amino acid sequence
ATSRSGGATLYTDSVKG

SEQ ID NO: 274 - protein, 17 aa, Artificial
  Xaa = any amino acid sequence
ALNWSGDRTWYLNSVKG

SEQ ID NO: 275 - protein, 17 aa, Artificial
  Xaa = any amino acid sequence
AIRWSEDRVWYLGSVRG

SEQ ID NO: 276 - protein, 17 aa, Artificial
  Xaa = any amino acid sequence
AAHWSGGRMWYKDSVKG

SEQ ID NO: 277 - protein, 17 aa, Artificial
  Xaa = any amino acid sequence
AITSSGGRRWYADSVLG

SEQ ID NO: 278 - protein, 17 aa, Artificial
  Xaa = any amino acid sequence
SITRTDNITYYEDSVKG

SEQ ID NO: 279 - protein, 17 aa, Artificial
  Xaa = any amino acid sequence
AGTWSTSVTEYADSVKG

SEQ ID NO: 280 - protein, 17 aa, Artificial
  Xaa = any amino acid sequence
DINWNGSWRFYAESVNG

SEQ ID NO: 281 - protein, 16 aa, Artificial
  Xaa = any amino acid sequence
SNRWNAKPYTTDSVKG

SEQ ID NO: 282 - protein, 16 aa, Artificial
  Xaa = any amino acid sequence
SIRWNAKPYTTDSVKG

SEQ ID NO: 283 - protein, 16 aa, Artificial
  Xaa = any amino acid sequence
SNRWNAKPYVTDSVKG

SEQ ID NO: 284 - protein, 16 aa, Artificial
  Xaa = any amino acid sequence
SDRWNAKPYTTDSVKG

SEQ ID NO: 285 - protein, 16 aa, Artificial
  Xaa = any amino acid sequence
SIRWNAKPYTTDSVKG

SEQ ID NO: 286 - protein, 16 aa, Artificial
  Xaa = any amino acid sequence
SVRWNAKPYTTDSVKG

SEQ ID NO: 287 - protein, 16 aa, Artificial
  Xaa = any amino acid sequence
SVRWNAKPYTTDSVKG

SEQ ID NO: 288 - protein, 17 aa, Artificial
  Xaa = any amino acid sequence
CISSSGGSTYYADSVKG

SEQ ID NO: 289 - protein, 17 aa, Artificial
  Xaa = any amino acid sequence
CISSSGGSTYYADSVKG

SEQ ID NO: 290 - protein, 17 aa, Artificial
  Xaa = any amino acid sequence
ALAWSGIRTYYAVSVKG

SEQ ID NO: 291 - protein, 17 aa, Artificial
  Xaa = any amino acid sequence
ALAWSGIRTYYAVSVKG

SEQ ID NO: 292 - protein, 17 aa, Artificial
  Xaa = any amino acid sequence
ALAWSGIRTYYAVSVKG

SEQ ID NO: 293 - protein, 17 aa, Artificial
  Xaa = any amino acid sequence
ALAWSGIRTYYAVSVKG

SEQ ID NO: 294 - protein, 17 aa, Artificial
  Xaa = any amino acid sequence
ALAWSGIRTYYAVSVKG

SEQ ID NO: 295 - protein, 15 aa, Artificial
  Xaa = any amino acid sequence
AISWSVPYYADSVKG

SEQ ID NO: 296 - protein, 17 aa, Artificial
  Xaa = any amino acid sequence
LINWSSGTTVYADSVKG

SEQ ID NO: 297 - protein, 17 aa, Artificial
  Xaa = any amino acid sequence
LINWSSGTTIYADSVKG

SEQ ID NO: 298 - protein, 17 aa, Artificial
  Xaa = any amino acid sequence
LINWSSGTTIYADSVKG

SEQ ID NO: 299 - protein, 17 aa, Artificial
  Xaa = any amino acid sequence
LINWSSGTTVYADSVKG

SEQ ID NO: 300 - protein, 17 aa, Artificial
  Xaa = any amino acid sequence
LINWSSGTTVYADSVKG

SEQ ID NO: 301 - protein, 17 aa, Artificial
  Xaa = any amino acid sequence
LINWSSGKTIYADSVKG

SEQ ID NO: 302 - protein, 17 aa, Artificial
  Xaa = any amino acid sequence
LINWSSGITVYLDSVKG

SEQ ID NO: 303 - protein, 17 aa, Artificial
  Xaa = any amino acid sequence
LINWSSGKTIYADSVKG

SEQ ID NO: 304 - protein, 17 aa, Artificial
  Xaa = any amino acid sequence
LINWSSGKTIYADSVKG

SEQ ID NO: 305 - protein, 17 aa, Artificial
  Xaa = any amino acid sequence
TLRWSDGSTYYADSVKG

SEQ ID NO: 306 - protein, 32 aa, Artificial
  FR3 sequence
RFTISRDNNKNAVYLQMNSLKPEDTAVYYCAA

SEQ ID NO: 307 - protein, 32 aa, Artificial
  FR3 sequence
RFTISRDNAKKTVYLQMNSLKPEDTAVYYCAA

SEQ ID NO: 308 - protein, 32 aa, Artificial
  FR3 sequence
RFTISRDNAKATVYLQMNSLKLEDTAVYYCAA

SEQ ID NO: 309 - protein, 32 aa, Artificial
  FR3 sequence
RFSISTDNANNILYLQMNSLKPEDTALYSCAK

SEQ ID NO: 310 - protein, 32 aa, Artificial
  FR3 sequence
RFTISRDNAKNTLYLQMNSLKPEDTAVYYCVQ

SEQ ID NO: 311 - protein, 32 aa, Artificial
  FR3 sequence
RFTISRDNAKNTLYLQMNSLKSEDTAVYYCAK

SEQ ID NO: 312 - protein, 32 aa, Artificial
  FR3 sequence
RFTISRDNAKNTLYLQMNSLKPEDTAVYYCLN

SEQ ID NO: 313 - protein, 32 aa, Artificial
  FR3 sequence
RFTVSRDNAKNTLYLQMNSLKPEDTALYYCAR

SEQ ID NO: 314 - protein, 32 aa, Artificial
  FR3 sequence
RFTISRDNAKNTLYLQMNSLKPGDTALYYCAA

SEQ ID NO: 315 - protein, 32 aa, Artificial; identical to SEQ ID NO: 112
  FR3 sequence

SEQ ID NO: 316 - protein, 32 aa, Artificial
  FR3 sequence
RFTISRDNGKNTMYLQMNSLKPEDTAVYYCAQ

SEQ ID NO: 317 - protein, 32 aa, Artificial
  FR3 sequence
RFTISRDNAKNTVYLEMNSLKPEDTAVYYCAS

SEQ ID NO: 318 - protein, 32 aa, Artificial
  FR3 sequence
RFTISRDNAKNTVDLQMNNLKPGDTAVYYCAA

SEQ ID NO: 319 - protein, 32 aa, Artificial
  FR3 sequence
RFTISRDNAKNTVSLQMNSLKPEDTAVYYCAA

SEQ ID NO: 320 - protein, 32 aa, Artificial
  FR3 sequence
RFTISRDNAKNTVYLQMNSLKPEDTAAYYCAA

SEQ ID NO: 321 - protein, 32 aa, Artificial
  FR3 sequence
RFTMSRDNNKNTVYLQMNSLKSEDTAVYYCAA

SEQ ID NO: 322 - protein, 32 aa, Artificial
  FR3 sequence
RFTISRDNAKNTVSLQMSSLRPEDTAVYYCAA

SEQ ID NO: 323 - protein, 32 aa, Artificial
  FR3 sequence
RFTIVRDTAKNTVYLQMNSLKPEDTAVYYCAA

SEQ ID NO: 324 - protein, 32 aa, Artificial
  FR3 sequence
RFTISRDTAKNTLYLQMNSLKPEDTAVYYCAA

SEQ ID NO: 325 - protein, 32 aa, Artificial; identical to SEQ ID NO: 112
  FR3 sequence

SEQ ID NO: 326 - protein, 32 aa, Artificial; identical to SEQ ID NO: 112
  FR3 sequence

SEQ ID NO: 327 - protein, 32 aa, Artificial
  FR3 sequence
RFTISRDNAKNTVYLQMNSLKPEDTAIYYCAA

SEQ ID NO: 328 - protein, 32 aa, Artificial; identical to SEQ ID NO: 112
  FR3 sequence

SEQ ID NO: 329 - protein, 32 aa, Artificial; identical to SEQ ID NO: 112
  FR3 sequence

SEQ ID NO: 330 - protein, 32 aa, Artificial
  FR3 sequence
RFTMSRDNAKNTVYLQMNSLRPEDTAVYYCAA

SEQ ID NO: 331 - protein, 32 aa, Artificial; identical to SEQ ID NO: 112
  FR3 sequence

SEQ ID NO: 332 - protein, 32 aa, Artificial; identical to SEQ ID NO: 112
  FR3 sequence

SEQ ID NO: 333 - protein, 32 aa, Artificial; identical to SEQ ID NO: 112
  FR3 sequence

SEQ ID NO: 334 - protein, 32 aa, Artificial
  FR3 sequence
RFTISRDNAKNTVYLQMNSLKPEDAAVYYCAA

SEQ ID NO: 335 - protein, 32 aa, Artificial
  FR3 sequence
RFTISRGDPNDTVYLQMTSLKPEDTAVYYCAT

SEQ ID NO: 336 - protein, 32 aa, Artificial; identical to SEQ ID NO: 335
  FR3 sequence

SEQ ID NO: 337 - protein, 32 aa, Artificial; identical to SEQ ID NO: 335
  FR3 sequence

SEQ ID NO: 338 - protein, 32 aa, Artificial; identical to SEQ ID NO: 335
  FR3 sequence

SEQ ID NO: 339 - protein, 32 aa, Artificial
  FR3 sequence
RFTISRGNPNDTVYLQMTSLKPEDTAVYYCAT

SEQ ID NO: 340 - protein, 32 aa, Artificial; identical to SEQ ID NO: 112
  FR3 sequence

SEQ ID NO: 341 - protein, 32 aa, Artificial
  FR3 sequence
RFTISGDNAKDTVYLEMNSLKPEDTAVYYCAV

SEQ ID NO: 342 - protein, 32 aa, Artificial; identical to SEQ ID NO: 341
  FR3 sequence

SEQ ID NO: 343 - protein, 32 aa, Artificial; identical to SEQ ID NO: 341
  FR3 sequence

SEQ ID NO: 344 - protein, 32 aa, Artificial; identical to SEQ ID NO: 341
  FR3 sequence

SEQ ID NO: 345 - protein, 32 aa, Artificial; identical to SEQ ID NO: 341
  FR3 sequence

SEQ ID NO: 346 - protein, 32 aa, Artificial; identical to SEQ ID NO: 341
  FR3 sequence

SEQ ID NO: 347 - protein, 32 aa, Artificial; identical to SEQ ID NO: 341
  FR3 sequence

SEQ ID NO: 348 - protein, 32 aa, Artificial; identical to SEQ ID NO: 341
  FR3 sequence

SEQ ID NO: 349 - protein, 32 aa, Artificial; identical to SEQ ID NO: 341
  FR3 sequence

SEQ ID NO: 350 - protein, 32 aa, Artificial
  FR3 sequence
RFTIAGDNAKNTVYLQMNNLKPEDTAVYYCAA

SEQ ID NO: 351 - protein, 16 aa, Artificial
  Xaa = any amino acid sequence
DPSRYFITTDRRGYDY

SEQ ID NO: 352 - protein, 14 aa, Artificial
  Xaa = any amino acid sequence
SRGVALATARPYDY

SEQ ID NO: 353 - protein, 17 aa, Artificial
  Xaa = any amino acid sequence
SWRSSIWIPAESDSYDF

SEQ ID NO: 354 - protein, 8 aa, Artificial
  Xaa = any amino acid sequence
GGAPNYTP

SEQ ID NO: 355 - protein, 5 aa, Artificial
  Xaa = any amino acid sequence
SHRTP

SEQ ID NO: 356 - protein, 6 aa, Artificial
  Xaa = any amino acid sequence
DAAGRT

SEQ ID NO: 357 - protein, 12 aa, Artificial
  Xaa = any amino acid sequence
RDYGTSWADFPS

SEQ ID NO: 358 - protein, 6 aa, Artificial
  Xaa = any amino acid sequence
DPFGKL

SEQ ID NO: 359 - protein, 17 aa, Artificial
  Xaa = any amino acid sequence
DVFFSGAHRYEASQWHY

SEQ ID NO: 360 - protein, 16 aa, Artificial
  Xaa = any amino acid sequence
GYFKRLGPTSPRDYTY

SEQ ID NO: 361 - protein, 9 aa, Artificial
  Xaa = any amino acid sequence
GWSLAEFRS

SEQ ID NO: 362 - protein, 16 aa, Artificial
  Xaa = any amino acid sequence
TAFRRRTYYTPESWDY

SEQ ID NO: 363 - protein, 14 aa, Artificial
  Xaa = any amino acid sequence
KSRPGYGGTLDYDY

SEQ ID NO: 364 - protein, 19 aa, Artificial
  Xaa = any amino acid sequence
KASGTIRGGSYYDSAGYSH

SEQ ID NO: 365 - protein, 15 aa, Artificial
  Xaa = any amino acid sequence
QDRRRGDYYTPDYHY

SEQ ID NO: 366 - protein, 17 aa, Artificial
  Xaa = any amino acid sequence
DSGAWGGSYYRAEEYVY

SEQ ID NO: 367 - protein, 16 aa, Artificial
  Xaa = any amino acid sequence
RGRVDYNYYNKDAYTY

SEQ ID NO: 368 - protein, 14 aa, Artificial
  Xaa = any amino acid sequence
AMTHFAVLEREYGY

SEQ ID NO: 369 - protein, 17 aa, Artificial
  Xaa = any amino acid sequence
EPYIPVRTMRHMTFLTY

SEQ ID NO: 370 - protein, 10 aa, Artificial
  Xaa = any amino acid sequence
KERGSGAYDY

SEQ ID NO: 371 - protein, 12 aa, Artificial
  Xaa = any amino acid sequence
DLTTWADGPYRY

SEQ ID NO: 372 - protein, 12 aa, Artificial
  Xaa = any amino acid sequence
DLTTWADGPYRY

SEQ ID NO: 373 - protein, 12 aa, Artificial
  Xaa = any amino acid sequence
DLTTWADGPYRY

SEQ ID NO: 374 - protein, 12 aa, Artificial
  Xaa = any amino acid sequence
DLTTWADGPYRF

SEQ ID NO: 375 - protein, 12 aa, Artificial
  Xaa = any amino acid sequence
DPTTWADGPYRY

SEQ ID NO: 376 - protein, 12 aa, Artificial
  Xaa = any amino acid sequence
DPTTWADGPYRY

SEQ ID NO: 377 - protein, 12 aa, Artificial
  Xaa = any amino acid sequence
DPTTWADGPYRY

SEQ ID NO: 378 - protein, 17 aa, Artificial
  Xaa = any amino acid sequence
QKGTPPLGCPAYYGMDY

SEQ ID NO: 379 - protein, 17 aa, Artificial
  Xaa = any amino acid sequence
QKGTPPLGCPAYYGMDY

SEQ ID NO: 380 - protein, 17 aa, Artificial
  Xaa = any amino acid sequence
GRASRTSDYYTDRIYDS

SEQ ID NO: 381 - protein, 17 aa, Artificial
  Xaa = any amino acid sequence
GRASRTSDYYTDRIYDS

SEQ ID NO: 382 - protein, 17 aa, Artificial
  Xaa = any amino acid sequence
GRASRTSDYYTDRIYDS

SEQ ID NO: 383 - protein, 17 aa, Artificial
  Xaa = any amino acid sequence
GRASSTSDYYTDRIYDS

SEQ ID NO: 384 - protein, 17 aa, Artificial
  Xaa = any amino acid sequence
GRAYRGSDYYTDRIYDS

SEQ ID NO: 385 - protein, 16 aa, Artificial
  Xaa = any amino acid sequence
DSLYWRSSRMATDYDY

SEQ ID NO: 386 - protein, 16 aa, Artificial
  Xaa = any amino acid sequence
GRRWSGSYYSALAYQY

SEQ ID NO: 387 - protein, 16 aa, Artificial
  Xaa = any amino acid sequence
GRRWSGSYYSALAYQY

SEQ ID NO: 388 - protein, 16 aa, Artificial
  Xaa = any amino acid sequence
GRRWSGSYYSALAYQY

SEQ ID NO: 389 - protein, 16 aa, Artificial
  Xaa = any amino acid sequence
GRRWSGSYYSALAYQY

SEQ ID NO: 390 - protein, 16 aa, Artificial
  Xaa = any amino acid sequence
GRRWSGSYYSALAYQY

SEQ ID NO: 391 - protein, 16 aa, Artificial
  Xaa = any amino acid sequence
GRAWSGSYYSALAYQY

SEQ ID NO: 392 - protein, 16 aa, Artificial
  Xaa = any amino acid sequence
GRAWSGSYYSALAYQY

SEQ ID NO: 393 - protein, 16 aa, Artificial
  Xaa = any amino acid sequence
GRAWSGSYYSALAYQY

SEQ ID NO: 394 - protein, 16 aa, Artificial
  Xaa = any amino acid sequence
GRAWSGSHYSALAYQY

SEQ ID NO: 395 - protein, 17 aa, Artificial
  Xaa = any amino acid sequence
DRWFSYTTYDATDTWHY

SEQ ID NO: 396 - protein, 11 aa, Artificial
  FR4 sequence
WGQGTQVTVSS

SEQ ID NO: 397 - protein, 11 aa, Artificial
  FR4 sequence
WGQGTQVTVSS

SEQ ID NO: 398 - protein, 11 aa, Artificial
  FR4 sequence
WAQGTQVTVSS

SEQ ID NO: 399 - protein, 11 aa, Artificial
  FR4 sequence
RGRGTQVTVSS

SEQ ID NO: 400 - protein, 11 aa, Artificial
  FR4 sequence
RSQGTQVTVSS

SEQ ID NO: 401 - protein, 11 aa, Artificial
  FR4 sequence
RGQGTQVTVSS

SEQ ID NO: 402 - protein, 11 aa, Artificial
  FR4 sequence
WGQGTQVTVSS

SEQ ID NO: 403 - protein, 11 aa, Artificial
  FR4 sequence
KGQGTQVTVSS

SEQ ID NO: 404 - protein, 11 aa, Artificial
  FR4 sequence
WGQGTQVTVSS

SEQ ID NO: 405 - protein, 11 aa, Artificial
  FR4 sequence
WGQGTQVTVSS

SEQ ID NO: 406 - protein, 11 aa, Artificial
  FR4 sequence
WGQGTQVTVSS

SEQ ID NO: 407 - protein, 11 aa, Artificial
  FR4 sequence
WGQGTQVTVSS

SEQ ID NO: 408 - protein, 11 aa, Artificial
  FR4 sequence
WGQGTQVTVSS

SEQ ID NO: 409 - protein, 11 aa, Artificial
  FR4 sequence
WGQGTQVTVSS

SEQ ID NO: 410 - protein, 11 aa, Artificial
  FR4 sequence
WGQGTQVTVSS

SEQ ID NO: 411 - protein, 11 aa, Artificial
  FR4 sequence
WGQGTQVTVSS

SEQ ID NO: 412 - protein, 11 aa, Artificial
  FR4 sequence
WGQGTQVTVSS

SEQ ID NO: 413 - protein, 11 aa, Artificial
  FR4 sequence
WGQGTQVTVSS

SEQ ID NO: 414 - protein, 11 aa, Artificial
  FR4 sequence
WGQGTQVTVSS

SEQ ID NO: 415 - protein, 11 aa, Artificial
  FR4 sequence
WGQGTQVTVSS

SEQ ID NO: 416 - protein, 11 aa, Artificial
  FR4 sequence
WGQGTQVTVSS

SEQ ID NO: 417 - protein, 11 aa, Artificial
  FR4 sequence
WGQGTQVTVSS

SEQ ID NO: 418 - protein, 11 aa, Artificial
  FR4 sequence
WGQGTQVTVSS

SEQ ID NO: 419 - protein, 11 aa, Artificial
  FR4 sequence
WGQGTQVTVSS

SEQ ID NO: 420 - protein, 11 aa, Artificial
  FR4 sequence
WGQGTQVTVSS

SEQ ID NO: 421 - protein, 11 aa, Artificial
  FR4 sequence
WGQGTQVTVSS

SEQ ID NO: 422 - protein, 11 aa, Artificial
  FR4 sequence
WGQGTQVTVSS

SEQ ID NO: 423 - protein, 11 aa, Artificial
  FR4 sequence
WGKGTLVTVSS

SEQ ID NO: 424 - protein, 11 aa, Artificial
  FR4 sequence
WGKGTLVTVSS

SEQ ID NO: 425 - protein, 11 aa, Artificial
  FR4 sequence
WGQGAQVTVSS

SEQ ID NO: 426 - protein, 11 aa, Artificial
  FR4 sequence
WGQGAQVTVSS

SEQ ID NO: 427 - protein, 11 aa, Artificial
  FR4 sequence
WGQGAQVTVSS

SEQ ID NO: 428 - protein, 11 aa, Artificial
  FR4 sequence
WGQGAQVTVSS

SEQ ID NO: 429 - protein, 11 aa, Artificial
  FR4 sequence
WGQGAQVTVSS

SEQ ID NO: 430 - protein, 11 aa, Artificial
  FR4 sequence
WGQGTQVTVSS

SEQ ID NO: 431 - protein, 11 aa, Artificial
  FR4 sequence
WGQGTQVTVSS

SEQ ID NO: 432 - protein, 11 aa, Artificial
  FR4 sequence
WGQGTQVTVSS

SEQ ID NO: 433 - protein, 11 aa, Artificial
  FR4 sequence
WGKGTQVTVSS

SEQ ID NO: 434 - protein, 11 aa, Artificial
  FR4 sequence
WGQGTQVTVSS

SEQ ID NO: 435 - protein, 11 aa, Artificial
  FR4 sequence
WGQGTQVTVSS

SEQ ID NO: 436 - protein, 11 aa, Artificial
  FR4 sequence
WGQGTQVTVSS

SEQ ID NO: 437 - protein, 11 aa, Artificial
  FR4 sequence
WGQGTQVTVSS

SEQ ID NO: 438 - protein, 11 aa, Artificial
  FR4 sequence
WGQGTQVTVSS

SEQ ID NO: 439 - protein, 11 aa, Artificial
  FR4 sequence
WGQGTQVTVSS

SEQ ID NO: 440 - protein, 11 aa, Artificial
  FR4 sequence
WGQGTQVTVSS

SEQ ID NO: 441 - protein, 125 aa, Artificial
  Nanobody sequence
EVQLVESGGGLVQAGGSLRLSCAASGRTFSSLAMGWFRQAPGKDREFVVVVSGSGGTTKYADSVKGRFTISRDNNKNAVYLQMNSLKPEDTAVYYCAADPSRYFITTDRRGYDYWGQGTQVTVSS

SEQ ID NO: 442 - protein, 123 aa, Artificial
  Nanobody sequence
KVQLVESGGGLVQAGGSLRLSCAASGRSFSDNVMGWFRQAAGKEREFVAHISRGGSRTEYADSVKGRFTISRDNAKKTVYLQMNSLKPEDTAVYYCAASRGVALATARPYDYWGQGTQVTVSS

SEQ ID NO: 443 - protein, 126 aa, Artificial
  Nanobody sequence
EVQLVESGGGLVQVGGSLRLSCAASGRTFSSARMGWFRQCPGKEREFVAAISWSNDITYYEDSVKGRFTISRDNAKATVYLQMNSLKLEDTAVYYCAASWRSSIWIPAESDSYDFWAQGTQVTVSS

SEQ ID NO: 444 - protein, 117 aa, Artificial
  Nanobody sequence
EVQLVESGGGLVQPGGSLRLACAVSGFTMSSSWMYWVRQAPGKGLEWVSSISPGGLFPYYVDSVKGRFSISTDNANNILYLQMNSLKPEDTALYSCAKGGAPNYTPRGRGTQVTVSS

SEQ ID NO: 445 - protein, 114 aa, Artificial
  Nanobody sequence
EVQLVESGGGLVQPGGSLRLSCAASGFTFSSYSMIWVRQAPGKGLEWVSEISSGGGWTSYADSVKGRFTISRDNAKNTLYLQMNSLKPEDTAVYYCVQSHRTPRSQGTQVTVSS

SEQ ID NO: 446 - protein, 115 aa, Artificial
  Nanobody sequence
EVQLVESGGGLVQPGGSLRLSCAASGFTFSNYWMYWLRQAPGKGLESVSSINTGGARTFYADSVKGRFTISRDNAKNTLYLQMNSLKSEDTAVYYCAKDAAGRTRGQGTQVTVSS

SEQ ID NO: 447 - protein, 121 aa, Artificial
  Nanobody sequence
EVQLVESGGDLVQPGGSLRLSCAASGFTFSRYEMSWVRQAPGKGLEWVSGISTGGGWRTYADSVKGRFTISRDNAKNTLYLQMNSLKPEDTAVYYCLNRDYGTSWADFPSWGQGTQVTVSS

SEQ ID NO: 448 - protein, 115 aa, Artificial
  Nanobody sequence
EVQLVESGGGLVQPGGSLRLSCAASGFTVSSYTMYWARQAPGKELEWVSIIFTNGEGTYYSDSVKGRFTVSRDNAKNTLYLQMNSLKPEDTALYYCARDPFGKLKGQGTQVTVSS

SEQ ID NO: 449 - protein, 125 aa, Artificial
  Nanobody sequence
EVQLVESGGGLVQAGSSLRLSCVASGRSVSTYGMAWFRQAPGKEREFVAINRSTGTIYYADSVKGRFTISRDNAKNTLYLQMNSLKPGDTALYYCAADVFFSGAHRYEASQWHYWGQGTQVTVSS

SEQ ID NO: 450 - protein, 123 aa, Artificial
  Nanobody sequence
EVQLVESGGGLVQPGGSLRLSCAASVRTFSNYFMGWFRQAPGKEREFVATIGWSGTDYADSVKGRFTISRDNAKNTVYLQMNSLKPEDTAVYYCAAGYFKRLGPTSPRDYTYWGQGTQVTVSS

SEQ ID NO: 451 - protein, 118 aa, Artificial
  Nanobody sequence
EVQLVESGGGLVQAGGSLRLSCVASGRTFGSYDMGWFRQAPGKEREFVAAISTGGGWRRYADSVKGRFTISRDNGKNTMYLQMNSLKPEDTAVYYCAQGWSLAEFRSWGQGTQVTVSS

SEQ ID NO: 452 - protein, 125 aa, Artificial
  Nanobody sequence
EVQLVESGGGLVQAGGSLRLSCAASARTFSSYAMSWFRQAPGKERDFVAVINWSGGSTYYADSVKGRFTISRDNAKNTVYLEMNSLKPEDTAVYYCASTAFRRRTYYTPESWDYWGQGTQVTVSS

SEQ ID NO: 453 - protein, 123 aa, Artificial
  Nanobody sequence
EVQLVESGGGLVQAGDSLRLSCAASGLTFSAYTMGWFRQAPGKEREFVSATSRSGGATLYTDSVKGRFTISRDNAKNTVDLQMNNLKPGDTAVYYCAAKSRPGYGGTLDYDYWGQGTQVTVSS

SEQ ID NO: 454 - protein, 128 aa, Artificial
  Nanobody sequence
EVQLVESGGGLVQSGGSLRLSCAASGLAFSTYAMGWFRQAPGKDREMVIALNWSGDRTWYLNSVKGRFTISRDNAKNTVSLQMNSLKPEDTAVYYCAAKASGTIRGGSYYDSAGYSHWGQGTQVTVSS

SEQ ID NO: 455 - protein, 124 aa, Artificial
  Nanobody sequence
EVQLVESGGGLVQAGVSLRLSCAASGRTFGNYNMGWFRQAQGKDRELVAAIRWSEDRVWYLGSVRGRFTISRDNAKNTVYLQMNSLKPEDTAAYYCAAQDRRRGDYYTPDYHYWGQGTQVTVSS

SEQ ID NO: 456 - protein, 126 aa, Artificial
  Nanobody sequence
EVQLVESGGRLVQAGGSLRLSCAASGGIFSRYNMGWFRQAPGKEREFVAAAHWSGGRMWYKDSVKGRFTMSRDNNKNTVYLQMNSLKSEDTAVYYCAADSGAWGGSYYRAEEYVYWGQGTQVTVSS

SEQ ID NO: 457 - protein, 125 aa, Artificial
  Nanobody sequence
EVQLVESGGGLVQAGASLRLSCAASGRTFSSYDMGWFRQAPGKERALVAAITSSGGRRWYADSVLGRFTISRDNAKNTVSLQMSSLRPEDTAVYYCAARGRVDYNYYNKDAYTYWGQGTQVTVSS

SEQ ID NO: 458 - protein, 123 aa, Artificial
  Nanobody sequence
EVQLVESGGRLVQAGDSLRLSCAASGGTVRNYAMGWFRQAPGQEREILSSITRTDNITYYEDSVKGRFTIVRDTAKNTVYLQMNSLKPEDTAVYYCAAAMTHFAVLEREYGYWGQGTQVTVSS

SEQ ID NO: 459 - protein, 126 aa, Artificial
  Nanobody sequence
EVQLVESGGGLVQAGGSLRLSCAASGRTISSYTMGWFRQAPGKEREFVAAGTWSTSVTEYADSVKGRFTISRDTAKNTLYLQMNSLKPEDTAVYYCAAEPYIPVRTMRHMTFLTYWGQGTQVTVSS

SEQ ID NO: 460 - protein, 119 aa, Artificial
  Nanobody sequence
EVQLVESGGGLVQAGGSLRLSCAPSGRDISSYIMGWFRQAPGKEREFTADINWNGSWRFYAESVNGRFTISRDNAKNTVYLQMNSLKPEDTAVYYCAAKERGSGAYDYWGQGTQVTVSS

SEQ ID NO: 461 - protein, 120 aa, Artificial
  Nanobody sequence
EVQLVESGGGLVQAGGSLRLSCTASGRALDTYTVTWFRQTPGKEREFVASNRWNAKPYTTDSVKGRFTISRDNAKNTVYLQMNSLKPEDTAVYYCAADLTTWADGPYRYWGQGTQVTVSS

SEQ ID NO: 462 - protein, 120 aa, Artificial
  Nanobody sequence
KVQLVESGGGLVQAGGSLRLSCAASGRALDTYTVTWFRQTPGKEREFVASIRWNAKPYTTDSVKGRFTISRDNAKNTVYLQMNSLKPEDTAIYYCAADLTTWADGPYRYWGQGTQVTVSS

SEQ ID NO: 463 - protein, 120 aa, Artificial
  Nanobody sequence
EVQLVESGGGLVQAGGSLRLSCTASGRALDTYTVTWFRQTPGKEREFVASNRWNAKPYVTDSVKGRFTISRDNAKNTVYLQMNSLKPEDTAVYYCAADLTTWADGPYRYWGQGTQVTVSS

SEQ ID NO: 464 - protein, 120 aa, Artificial
  Nanobody sequence
EVQLVESGGGLVQAGGSLRLSCAASGRALDTYTVTWFRQTPGKEREFVASDRWNAKPYTTDSVKGRFTISRDNAKNTVYLQMNSLKPEDTAVYYCAADLTTWADGPYRFWGQGTQVTVSS

SEQ ID NO: 465 - protein, 120 aa, Artificial
  Nanobody sequence
EVQLVESGGGLVQAGGSLRLSCAASGRALDTYTVTWFRQTPGKGREFLASIRWNAKPYTTDSVKGRFTMSRDNAKNTVYLQMNSLRPEDTAVYYCAADPTTWADGPYRYWGQGTQVTVSS

SEQ ID NO: 466 - protein, 120 aa, Artificial
  Nanobody sequence
EVQLVESGGGLVQPGGSLRLSCAASGRALDTYTVTWFRQTPGKTREFVASVRWNAKPYTTDSVKGRFTISRDNAKNTVYLQMNSLKPEDTAVYYCAADPTTWADGPYRYWGQGTQVTVSS

SEQ ID NO: 467 - protein, 120 aa, Artificial
  Nanobody sequence
EVHLVESGGGLVQAGGSLRLSCAASGRALDTYTVTWFRQTPGKTREFVASVRWNAKPYTTDSVKGRFTISRDNAKNTVYLQMNSLKPEDTAVYYCAADPTTWADGPYRYWGQGTQVTVSS

SEQ ID NO: 468 - protein, 126 aa, Artificial
  Nanobody sequence
EVQLVESGGGLVQPGGSLRLSCAASGFTLDYYGIGWFRQAPGKEREWVSCISSSGGSTYYADSVKGRFTISRDNAKNTVYLQMNSLKPEDTAVYYCAAQKGTPPLGCPAYYGMDYWGKGTLVTVSS

SEQ ID NO: 469 - protein, 126 aa, Artificial
  Nanobody sequence
EVQLVESGGGLVQPGGSLRLSCAASGFTLDYYGIGWFRQAPGKEREWVSCISSSGGSTYYADSVKGRFTISRDNAKNTVYLQMNSLKPEDAAVYYCAAQKGTPPLGCPAYYGMDYWGKGTLVTVSS

SEQ ID NO: 470 - protein, 126 aa, Artificial
  Nanobody sequence
EVQLVESGGGLVQAGGSLRLSCAASGRTFSGVDVAWFRQAPGKEREFVAALAWSGIRTYYAVSVKGRFTISRGDPNDTVYLQMTSLKPEDTAVYYCATGRASRTSDYYTDRIYDSWGQGAQVTVSS

SEQ ID NO: 471 - protein, 126 aa, Artificial
  Nanobody sequence
EVPMVESGGGLVQAGGSLRLSCAASGRTFSGVDVAWFRQAPGKEREFVAALAWSGIRTYYAVSVKGRFTISRGDPNDTVYLQMTSLKPEDTAVYYCATGRASRTSDYYTDRIYDSWGQGAQVTVSS

SEQ ID NO: 472 - protein, 126 aa, Artificial
  Nanobody sequence
EVQLVESGGGLVQAGGSLRLSCAASGRTFSGVDVAWFRQATGKEREFVAALAWSGIRTYYAVSVKGRFTISRGDPNDTVYLQMTSLKPEDTAVYYCATGRASRTSDYYTDRIYDSWGQGAQVTVSS

SEQ ID NO: 473 - protein, 126 aa, Artificial
  Nanobody sequence
EVQLVESGGGLVQAGGSLRLSCAASGRTFSGVDVAWFRQAPGKEREFVAALAWSGIRTYYAVSVKGRFTISRGDPNDTVYLQMTSLKPEDTAVYYCATGRASSTSDYYTDRIYDSWGQGAQVTVSS

SEQ ID NO: 474 - protein, 126 aa, Artificial
  Nanobody sequence
EVQLVESGGGLVQAGGSLRLSCAASGRTFSGVDVAWFRQAPGKEREFVAALAWSGIRTYYAVSVKGRFTISRGNPNDTVYLQMTSLKPEDTAVYYCATGRAYRGSDYYTDRIYDSWGQGAQVTVSS

SEQ ID NO: 475 - protein, 123 aa, Artificial
  Nanobody sequence
EVQLVESGGGLVQPGGSLRLSCAASGRALSSYSVGWFRQAPGKEREFVTAISWSVPYYADSVKGRFTISRDNAKNTVYLQMNSLKPEDTAVYYCAADSLYWRSSRMATDYDYWGQGTQVTVSS

SEQ ID NO: 476 - protein, 125 aa, Artificial
  Nanobody sequence
EVQLVESGGGLVQAGGALRLSCAASGRTFETYRMGWFRQAPGKEREFVALINWSSGTTVYADSVKGRFTISGDNAKDTVYLEMNSLKPEDTAVYYCAVGRRWSGSYYSALAYQYWGQGTQVTVSS

SEQ ID NO: 477 - protein, 125 aa, Artificial
  Nanobody sequence
EVQLVESGGGLVQAGGALRLSCAASGRTFETYRMGWFRQAPGKEREFVALINWSSGTTIYADSVKGRFTISGDNAKDTVYLEMNSLKPEDTAVYYCAVGRRWSGSYYSALAYQYWGQGTQVTVSS

SEQ ID NO: 478 - protein, 125 aa, Artificial
  Nanobody sequence
EVQLVESGGGLVQAGGALRLSCAASGRTFETYRMGWFRQAPGKEREFVALINWSSGTTIYADSVKGRFTISGDNAKDTVYLEMNSLKPEDTAVYYCAVGRRWSGSYYSALAYQYWGKGTQVTVSS

SEQ ID NO: 479 - protein, 125 aa, Artificial
  Nanobody sequence
EVQLVESGGGLVHAGGALRLSCAASGRAFETYRMGWFRQAPGKEREFVALINWSSGTTVYADSVKGRFTISGDNAKDTVYLEMNSLKPEDTAVYYCAVGRRWSGSYYSALAYQYWGQGTQVTVSS

SEQ ID NO: 480 - protein, 125 aa, Artificial
  Nanobody sequence
EVQLVESGGGLVQAGGALRPSCAASGRTFETYRMGWFRQAPGKEREFVALINWSSGTTVYADSVKGRFTISGDNAKDTVYLEMNSLKPEDTAVYYCAVGRRWSGSYYSALAYQYWGQGTQVTVSS

SEQ ID NO: 481 - protein, 125 aa, Artificial
  Nanobody sequence
EVQLVESGGGLVQAGGALRLSCAVSGRTFESYRMGWFRQAPGKEREFVSLINWSSGKTIYADSVKGRFTISGDNAKDTVYLEMNSLKPEDTAVYYCAVGRAWSGSYYSALAYQYWGQGTQVTVSS

SEQ ID NO: 482 - protein, 125 aa, Artificial
  Nanobody sequence
EVQLVESGGGLVQAGGALRLSCAASGRTFETYRMGWFRQAPGKEREFVALINWSSGITVYLDSVKGRFTISGDNAKDTVYLEMNSLKPEDTAVYYCAVGRAWSGSYYSALAYQYWGQGTQVTVSS

SEQ ID NO: 483 - protein, 125 aa, Artificial
  Nanobody sequence
EVQLMESGGGLVQAGGSLRLSCAVSGRTFESYRMGWFRQAPGKEREFVSLINWSSGKTIYADSVKGRFTISGDNAKDTVYLEMNSLKPEDTAVYYCAVGRAWSGSYYSALAYQYWGQGTQVTVSS

SEQ ID NO: 484 - protein, 125 aa, Artificial
  Nanobody sequence
EVQLVESGGGSVQAGGALRLSCAVSGRTFESYRMGWFRQAPGKEREFVSLINWSSGKTIYADSVKGRFTISGDNAKDTVYLEMNSLKPEDTAVYYCAVGRAWSGSHYSALAYQYWGQGTQVTVSS

SEQ ID NO: 485 - protein, 126 aa, Artificial
  Nanobody sequence
EVQLVESGGGLVQTGGSLRLSCAASGRTFGTYAMAWFRQSPKNEREFVATLRWSDGSTYYADSVKGRFTIAGDNAKNTVYLQMNNLKPEDTAVYYCAADRWFSYTTYDATDTWHYWGQGTQVTVSS

SEQ ID NO: 486 - protein, 259 aa, Artificial
  Nanobody sequence
EVQLVESGGGLVQAGGSLRLSCAASGRTFSSLAMGWFRQAPGKDREFVVVVSGSGGTTKYADSVKGRFTISRDNNKNAVYLQMNSLKPEDTAVYYCAADPSRYFITTDRRGYDYWGQGTQVTVSSGGGGSGGGSEVQLVESGGGLVQAGGSLRLSCAASGRTFSSLAMGWFRQAPGKDREFVVVVSGSGGTTKYADSVKGRFTISRDNNKNAVYLQMNSLKPEDTAVYYCAADPSRYFITTDRRGYDYWGQGTQVTVSS

SEQ ID NO: 487 - protein, 255 aa, Artificial
  Nanobody sequence
KVQLVESGGGLVQAGGSLRLSCAASGRSFSDNVMGWFRQAAGKEREFVAHISRGGSRTEYADSVKGRFTISRDNAKKTVYLQMNSLKPEDTAVYYCAASRGVALATARPYDYWGQGTQVTVSSGGGGSGGGSKVQLVESGGGLVQAGGSLRLSCAASGRSFSDNVMGWFRQAAGKEREFVAHISRGGSRTEYADSVKGRFTISRDNAKKTVYLQMNSLKPEDTAVYYCAASRGVALATARPYDYWGQGTQVTVSS

SEQ ID NO: 488 - protein, 261 aa, Artificial
  Nanobody sequence
EVQLVESGGGLVQVGGSLRLSCAASGRTFSSARMGWFRQCPGKEREFVAAISWSNDITYYEDSVKGRFTISRDNAKATVYLQMNSLKLEDTAVYYCAASWRSSIWIPAESDSYDFWAQGTQVTVSSGGGGSGGGSEVQLVESGGGLVQVGGSLRLSCAASGRTFSSARMGWFRQCPGKEREFVAAISWSNDITYYEDSVKGRFTISRDNAKATVYLQMNSLKLEDTAVYYCAASWRSSIWIPAESDSYDFWAQGTQVTVSS

SEQ ID NO: 489 - protein, 243 aa, Artificial
  Nanobody sequence
EVQLVESGGGLVQPGGSLRLACAVSGFTMSSSWMYWVRQAPGKGLEWVSSISPGGLFPYYVDSVKGRFSISTDNANNILYLQMNSLKPEDTALYSCAKGGAPNYTPRGRGTQVTVSSGGGGSGGGSEVQLVESGGGLVQPGGSLRLACAVSGFTMSSSWMYWVRQAPGKGLEWVSSISPGGLFPYYVDSVKGRFSISTDNANNILYLQMNSLKPEDTALYSCAKGGAPNYTPRGRGTQVTVSS

SEQ ID NO: 490 - protein, 237 aa, Artificial
  Nanobody sequence
EVQLVESGGGLVQPGGSLRLSCAASGFTFSSYSMIWVRQAPGKGLEWVSEISSGGGWTSYADSVKGRFTISRDNAKNTLYLQMNSLKPEDTAVYYCVQSHRTPRSQGTQVTVSSGGGGSGGGSEVQLVESGGGLVQPGGSLRLSCAASGFTFSSYSMIWVRQAPGKGLEWVSEISSGGGWTSYADSVKGRFTISRDNAKNTLYLQMNSLKPEDTAVYYCVQSHRTPRSQGTQVTVSS

SEQ ID NO: 491 - protein, 239 aa, Artificial
  Nanobody sequence
EVQLVESGGGLVQPGGSLRLSCAASGFTFSNYWMYWLRQAPGKGLESVSSINTGGARTFYADSVKGRFTISRDNAKNTLYLQMNSLKSEDTAVYYCAKDAAGRTRGQGTQVTVSSGGGGSGGGSEVQLVESGGGLVQPGGSLRLSCAASGFTFSNYWMYWLRQAPGKGLESVSSINTGGARTFYADSVKGRFTISRDNAKNTLYLQMNSLKSEDTAVYYCAKDAAGRTRGQGTQVTVSS

SEQ ID NO: 492 - protein, 251 aa, Artificial
  Nanobody sequence
EVQLVESGGDLVQPGGSLRLSCAASGFTFSRYEMSWVRQAPGKGLEWVSGISTGGGWRTYADSVKGRFTISRDNAKNTLYLQMNSLKPEDTAVYYCLNRDYGTSWADFPSWGQGTQVTVSSGGGGSGGGSEVQLVESGGDLVQPGGSLRLSCAASGFTFSRYEMSWVRQAPGKGLEWVSGISTGGGWRTYADSVKGRFTISRDNAKNTLYLQMNSLKPEDTAVYYCLNRDYGTSWADFPSWGQGTQVTVSS

SEQ ID NO: 493 - protein, 239 aa, Artificial
  Nanobody sequence
EVQLVESGGGLVQPGGSLRLSCAASGFTVSSYTMYWARQAPGKELEWVSIIFTNGEGTYYSDSVKGRFTVSRDNAKNTLYLQMNSLKPEDTALYYCARDPFGKLKGQGTQVTVSSGGGGSGGGSEVQLVESGGGLVQPGGSLRLSCAASGFTVSSYTMYWARQAPGKELEWVSIIFTNGEGTYYSDSVKGRFTVSRDNAKNTLYLQMNSLKPEDTALYYCARDPFGKLKGQGTQVTVSS

SEQ ID NO: 494 - protein, 259 aa, Artificial
  Nanobody sequence
EVQLVESGGGLVQAGSSLRLSCVASGRSVSTYGMAWFRQAPGKEREFVAINRSTGTIYYADSVKGRFTISRDNAKNTLYLQMNSLKPGDTALYYCAADVFFSGAHRYEASQWHYWGQGTQVTVSSGGGGSGGGSEVQLVESGGGLVQAGSSLRLSCVASGRSVSTYGMAWFRQAPGKEREFVAINRSTGTIYYADSVKGRFTISRDNAKNTLYLQMNSLKPGDTALYYCAADVFFSGAHRYEASQWHYWGQGTQVTVSS

SEQ ID NO: 495 - protein, 255 aa, Artificial
  Nanobody sequence
EVQLVESGGGLVQPGGSLRLSCAASVRTFSNYFMGWFRQAPGKEREFVATIGWSGTDYADSVKGRFTISRDNAKNTVYLQMNSLKPEDTAVYYCAAGYFKRLGPTSPRDYTYWGQGTQVTVSSGGGGSGGGSEVQLVESGGGLVQPGGSLRLSCAASVRTFSNYFMGWFRQAPGKEREFVATIGWSGTDYADSVKGRFTISRDNAKNTVYLQMNSLKPEDTAVYYCAAGYFKRLGPTSPRDYTYWGQGTQVTVSS

SEQ ID NO: 496 - protein, 245 aa, Artificial
  Nanobody sequence
EVQLVESGGGLVQAGGSLRLSCVASGRTFGSYDMGWFRQAPGKEREFVAAISTGGGWRRYADSVKGRFTISRDNGKNTMYLQMNSLKPEDTAVYYCAQGWSLAEFRSWGQGTQVTVSSGGGGSGGGSEVQLVESGGGLVQAGGSLRLSCVASGRTFGSYDMGWFRQAPGKEREFVAAISTGGGWRRYADSVKGRFTISRDNGKNTMYLQMNSLKPEDTAVYYCAQGWSLAEFRSWGQGTQVTVSS

SEQ ID NO: 497 - protein, 259 aa, Artificial
  Nanobody sequence
EVQLVESGGGLVQAGGSLRLSCAASARTFSSYAMSWFRQAPGKERDFVAVINWSGGSTYYADSVKGRFTISRDNAKNTVYLEMNSLKPEDTAVYYCASTAFRRRTYYTPESWDYWGQGTQVTVSSGGGGSGGGSEVQLVESGGGLVQAGGSLRLSCAASARTFSSYAMSWFRQAPGKERDFVAVINWSGGSTYYADSVKGRFTISRDNAKNTVYLEMNSLKPEDTAVYYCASTAFRRRTYYTPESWDYWGQGTQVTVSS

SEQ ID NO: 498 - protein, 255 aa, Artificial
  Nanobody sequence
EVQLVESGGGLVQAGDSLRLSCAASGLTFSAYTMGWFRQAPGKEREFVSATSRSGGATLYTDSVKGRFTISRDNAKNTVDLQMNNLKPGDTAVYYCAAKSRPGYGGTLDYDYWGQGTQVTVSSGGGGSGGGSEVQLVESGGGLVQAGDSLRLSCAASGLTFSAYTMGWFRQAPGKEREFVSATSRSGGATLYTDSVKGRFTISRDNAKNTVDLQMNNLKPGDTAVYYCAAKSRPGYGGTLDYDYWGQGTQVTVSS

SEQ ID NO: 499 - protein, 265 aa, Artificial
  Nanobody sequence
EVQLVESGGGLVQSGGSLRLSCAASGLAFSTYAMGWFRQAPGKDREMVIALNWSGDRTWYLNSVKGRFTISRDNAKNTVSLQMNSLKPEDTAVYYCAAKASGTIRGGSYYDSAGYSHWGQGTQVTVSSGGGGSGGGSEVQLVESGGGLVQSGGSLRLSCAASGLAFSTYAMGWFRQAPGKDREMVIALNWSGDRTWYLNSVKGRFTISRDNAKNTVSLQMNSLKPEDTAVYYCAAKASGTIRGGSYYDSAGYSHWGQGTQVTVSS

SEQ ID NO: 500 - protein, 257 aa, Artificial
  Nanobody sequence
EVQLVESGGGLVQAGVSLRLSCAASGRTFGNYNMGWFRQAQGKDRELVAAIRWSEDRVWYLGSVRGRFTISRDNAKNTVYLQMNSLKPEDTAAYYCAAQDRRRGDYYTPDYHYWGQGTQVTVSSGGGGSGGGSEVQLVESGGGLVQAGVSLRLSCAASGRTFGNYNMGWFRQAQGKDRELVAAIRWSEDRVWYLGSVRGRFTISRDNAKNTVYLQMNSLKPEDTAAYYCAAQDRRRGDYYTPDYHYWGQGTQVTVSS

SEQ ID NO: 501 - protein, 261 aa, Artificial
  Nanobody sequence
EVQLVESGGRLVQAGGSLRLSCAASGGIFSRYNMGWFRQAPGKEREFVAAAHWSGGRMWYKDSVKGRFTMSRDNNKNTVYLQMNSLKSEDTAVYYCAADSGAWGGSYYRAEEYVYWGQGTQVTVSSGGGGSGGGSEVQLVESGGRLVQAGGSLRLSCAASGGIFSRYNMGWFRQAPGKEREFVAAAHWSGGRMWYKDSVKGRFTMSRDNNKNTVYLQMNSLKSEDTAVYYCAADSGAWGGSYYRAEEYVYWGQGTQVTVSS

SEQ ID NO: 502 - protein, 259 aa, Artificial
  Nanobody sequence
EVQLVESGGGLVQAGASLRLSCAASGRTFSSYDMGWFRQAPGKERALVAAITSSGGRRWYADSVLGRFTISRDNAKNTVSLQMSSLRPEDTAVYYCAARGRVDYNYYNKDAYTYWGQGTQVTVSSGGGGSGGGSEVQLVESGGGLVQAGASLRLSCAASGRTFSSYDMGWFRQAPGKERALVAAITSSGGRRWYADSVLGRFTISRDNAKNTVSLQMSSLRPEDTAVYYCAARGRVDYNYYNKDAYTYWGQGTQVTVSS

SEQ ID NO: 503 - protein, 255 aa, Artificial
  Nanobody sequence
EVQLVESGGRLVQAGDSLRLSCAASGGTVRNYAMGWFRQAPGQEREILSSITRTDNITYYEDSVKGRFTIVRDTAKNTVYLQMNSLKPEDTAVYYCAAAMTHFAVLEREYGYWGQGTQVTVSSGGGGSGGGSEVQLVESGGRLVQAGDSLRLSCAASGGTVRNYAMGWFRQAPGQEREILSSITRTDNITYYEDSVKGRFTIVRDTAKNTVYLQMNSLKPEDTAVYYCAAAMTHFAVLEREYGYWGQGTQVTVSS

SEQ ID NO: 504 - protein, 261 aa, Artificial
  Nanobody sequence
EVQLVESGGGLVQAGGSLRLSCAASGRTISSYTMGWFRQAPGKEREFVAAGTWSTSVTEYADSVKGRFTISRDTAKNTLYLQMNSLKPEDTAVYYCAAEPYIPVRTMRHMTFLTYWGQGTQVTVSSGGGGSGGGSEVQLVESGGGLVQAGGSLRLSCAASGRTISSYTMGWFRQAPGKEREFVAAGTWSTSVTEYADSVKGRFTISRDTAKNTLYLQMNSLKPEDTAVYYCAAEPYIPVRTMRHMTFLTYWGQGTQVTVSS

SEQ ID NO: 505 - protein, 247 aa, Artificial
  Nanobody sequence
EVQLVESGGGLVQAGGSLRLSCAPSGRDISSYIMGWFRQAPGKEREFTADINWNGSWRFYAESVNGRFTISRDNAKNTVYLQMNSLKPEDTAVYYCAAKERGSGAYDYWGQGTQVTVSSGGGGSGGGSEVQLVESGGGLVQAGGSLRLSCAPSGRDISSYIMGWFRQAPGKEREFTADINWNGSWRFYAESVNGRFTISRDNAKNTVYLQMNSLKPEDTAVYYCAAKERGSGAYDYWGQGTQVTVSS

SEQ ID NO: 506 - protein, 249 aa, Artificial
  Nanobody sequence
EVQLVESGGGLVQAGGSLRLSCTASGRALDTYTVTWFRQTPGKEREFVASNRWNAKPYTTDSVKGRFTISRDNAKNTVYLQMNSLKPEDTAVYYCAADLTTWADGPYRYWGQGTQVTVSSGGGGSGGGSEVQLVESGGGLVQAGGSLRLSCTASGRALDTYTVTWFRQTPGKEREFVASNRWNAKPYTTDSVKGRFTISRDNAKNTVYLQMNSLKPEDTAVYYCAADLTTWADGPYRYWGQGTQVTVSS

SEQ ID NO: 507 - protein, 249 aa, Artificial
  Nanobody sequence
KVQLVESGGGLVQAGGSLRLSCAASGRALDTYTVTWFRQTPGKEREFVASIRWNAKPYTTDSVKGRFTISRDNAKNTVYLQMNSLKPEDTAIYYCAADLTTWADGPYRYWGQGTQVTVSSGGGGSGGGSKVQLVESGGGLVQAGGSLRLSCAASGRALDTYTVTWFRQTPGKEREFVASIRWNAKPYTTDSVKGRFTISRDNAKNTVYLQMNSLKPEDTAIYYCAADLTTWADGPYRYWGQGTQVTVSS

SEQ ID NO: 508 - protein, 249 aa, Artificial
  Nanobody sequence
EVQLVESGGGLVQAGGSLRLSCTASGRALDTYTVTWFRQTPGKEREFVASNRWNAKPYVTDSVKGRFTISRDNAKNTVYLQMNSLKPEDTAVYYCAADLTTWADGPYRYWGQGTQVTVSSGGGGSGGGSEVQLVESGGGLVQAGGSLRLSCTASGRALDTYTVTWFRQTPGKEREFVASNRWNAKPYVTDSVKGRFTISRDNAKNTVYLQMNSLKPEDTAVYYCAADLTTWADGPYRYWGQGTQVTVSS

SEQ ID NO: 509 - protein, 249 aa, Artificial
  Nanobody sequence
EVQLVESGGGLVQAGGSLRLSCAASGRALDTYTVTWFRQTPGKEREFVASDRWNAKPYTTDSVKGRFTISRDNAKNTVYLQMNSLKPEDTAVYYCAADLTTWADGPYRFWGQGTQVTVSSGGGGSGGGSEVQLVESGGGLVQAGGSLRLSCAASGRALDTYTVTWFRQTPGKEREFVASDRWNAKPYTTDSVKGRFTISRDNAKNTVYLQMNSLKPEDTAVYYCAADLTTWADGPYRFWGQGTQVTVSS

SEQ ID NO: 510 - protein, 249 aa, Artificial
  Nanobody sequence
EVQLVESGGGLVQAGGSLRLSCAASGRALDTYTVTWFRQTPGKGREFLASIRWNAKPYTTDSVKGRFTMSRDNAKNTVYLQMNSLRPEDTAVYYCAADPTTWADGPYRYWGQGTQVTVSSGGGGSGGGSEVQLVESGGGLVQAGGSLRLSCAASGRALDTYTVTWFRQTPGKGREFLASIRWNAKPYTTDSVKGRFTMSRDNAKNTVYLQMNSLRPEDTAVYYCAADPTTWADGPYRYWGQGTQVTVSS

SEQ ID NO: 511 - protein, 249 aa, Artificial
  Nanobody sequence
EVQLVESGGGLVQPGGSLRLSCAASGRALDTYTVTWFRQTPGKTREFVASVRWNAKPYTTDSVKGRFTISRDNAKNTVYLQMNSLKPEDTAVYYCAADPTTWADGPYRYWGQGTQVTVSSGGGGSGGGSEVQLVESGGGLVQPGGSLRLSCAASGRALDTYTVTWFRQTPGKTREFVASVRWNAKPYTTDSVKGRFTISRDNAKNTVYLQMNSLKPEDTAVYYCAADPTTWADGPYRYWGQGTQVTVSS

SEQ ID NO: 512 - protein, 249 aa, Artificial
  Nanobody sequence
EVHLVESGGGLVQAGGSLRLSCAASGRALDTYTVTWFRQTPGKTREFVASVRWNAKPYTTDSVKGRFTISRDNAKNTVYLQMNSLKPEDTAVYYCAADPTTWADGPYRYWGQGTQVTVSSGGGGSGGGSEVHLVESGGGLVQAGGSLRLSCAASGRALDTYTVTWFRQTPGKTREFVASVRWNAKPYTTDSVKGRFTISRDNAKNTVYLQMNSLKPEDTAVYYCAADPTTWADGPYRYWGQGTQVTVSS

SEQ ID NO: 513 - protein, 261 aa, Artificial
  Nanobody sequence
EVQLVESGGGLVQPGGSLRLSCAASGFTLDYYGIGWFRQAPGKEREWVSCISSSGGSTYYADSVKGRFTISRDNAKNTVYLQMNSLKPEDTAVYYCAAQKGTPPLGCPAYYGMDYWGKGTLVTVSSGGGGSGGGSEVQLVESGGGLVQPGGSLRLSCAASGFTLDYYGIGWFRQAPGKEREWVSCISSSGGSTYYADSVKGRFTISRDNAKNTVYLQMNSLKPEDTAVYYCAAQKGTPPLGCPAYYGMDYWGKGTLVTVSS

SEQ ID NO: 514 - protein, 261 aa, Artificial
  Nanobody sequence
EVQLVESGGGLVQPGGSLRLSCAASGFTLDYYGIGWFRQAPGKEREWVSCISSSGGSTYYADSVKGRFTISRDNAKNTVYLQMNSLKPEDAAVYYCAAQKGTPPLGCPAYYGMDYWGKGTLVTVSSGGGGSGGGSEVQLVESGGGLVQPGGSLRLSCAASGFTLDYYGIGWFRQAPGKEREWVSCISSSGGSTYYADSVKGRFTISRDNAKNTVYLQMNSLKPEDAAVYYCAAQKGTPPLGCPAYYGMDYWGKGTLVTVSS

SEQ ID NO: 515 - protein, 261 aa, Artificial
  Nanobody sequence
EVQLVESGGGLVQAGGSLRLSCAASGRTFSGVDVAWFRQAPGKEREFVAALAWSGIRTYYAVSVKGRFTISRGDPNDTVYLQMTSLKPEDTAVYYCATGRASRTSDYYTDRIYDSWGQGAQVTVSSGGGGSGGGSEVQLVESGGGLVQAGGSLRLSCAASGRTFSGVDVAWFRQAPGKEREFVAALAWSGIRTYYAVSVKGRFTISRGDPNDTVYLQMTSLKPEDTAVYYCATGRASRTSDYYTDRIYDSWGQGAQVTVSS

SEQ ID NO: 516 - protein, 261 aa, Artificial
  Nanobody sequence
EVPMVESGGGLVQAGGSLRLSCAASGRTFSGVDVAWFRQAPGKEREFVAALAWSGIRTYYAVSVKGRFTISRGDPNDTVYLQMTSLKPEDTAVYYCATGRASRTSDYYTDRIYDSWGQGAQVTVSSGGGGSGGGSEVPMVESGGGLVQAGGSLRLSCAASGRTFSGVDVAWFRQAPGKEREFVAALAWSGIRTYYAVSVKGRFTISRGDPNDTVYLQMTSLKPEDTAVYYCATGRASRTSDYYTDRIYDSWGQGAQVTVSS

SEQ ID NO: 517 - protein, 261 aa, Artificial
  Nanobody sequence
EVQLVESGGGLVQAGGSLRLSCAASGRTFSGVDVAWFRQATGKEREFVAALAWSGIRTYYAVSVKGRFTISRGDPNDTVYLQMTSLKPEDTAVYYCATGRASRTSDYYTDRIYDSWGQGAQVTVSSGGGGSGGGSEVQLVESGGGLVQAGGSLRLSCAASGRTFSGVDVAWFRQATGKEREFVAALAWSGIRTYYAVSVKGRFTISRGDPNDTVYLQMTSLKPEDTAVYYCATGRASRTSDYYTDRIYDSWGQGAQVTVSS

SEQ ID NO: 518 - protein, 261 aa, Artificial
  Nanobody sequence
EVQLVESGGGLVQAGGSLRLSCAASGRTFSGVDVAWFRQAPGKEREFVAALAWSGIRTYYAVSVKGRFTISRGDPNDTVYLQMTSLKPEDTAVYYCATGRASSTSDYYTDRIYDSWGQGAQVTVSSGGGGSGGGSEVQLVESGGGLVQAGGSLRLSCAASGRTFSGVDVAWFRQAPGKEREFVAALAWSGIRTYYAVSVKGRFTISRGDPNDTVYLQMTSLKPEDTAVYYCATGRASSTSDYYTDRIYDSWGQGAQVTVSS

SEQ ID NO: 519 - protein, 261 aa, Artificial
  Nanobody sequence
EVQLVESGGGLVQAGGSLRLSCAASGRTFSGVDVAWFRQAPGKEREFVAALAWSGIRTYYAVSVKGRFTISRGNPNDTVYLQMTSLKPEDTAVYYCATGRAYRGSDYYTDRIYDSWGQGAQVTVSSGGGGSGGGSEVQLVESGGGLVQAGGSLRLSCAASGRTFSGVDVAWFRQAPGKEREFVAALAWSGIRTYYAVSVKGRFTISRGNPNDTVYLQMTSLKPEDTAVYYCATGRAYRGSDYYTDRIYDSWGQGAQVTVSS

SEQ ID NO: 520 - protein, 255 aa, Artificial
  Nanobody sequence
EVQLVESGGGLVQPGGSLRLSCAASGRALSSYSVGWFRQAPGKEREFVTAISWSVPYYADSVKGRFTISRDNAKNTVYLQMNSLKPEDTAVYYCAADSLYWRSSRMATDYDYWGQGTQVTVSSGGGGSGGGSEVQLVESGGGLVQPGGSLRLSCAASGRALSSYSVGWFRQAPGKEREFVTAISWSVPYYADSVKGRFTISRDNAKNTVYLQMNSLKPEDTAVYYCAADSLYWRSSRMATDYDYWGQGTQVTVSS

SEQ ID NO: 521 - protein, 259 aa, Artificial
  Nanobody sequence
EVQLVESGGGLVQAGGALRLSCAASGRTFETYRMGWFRQAPGKEREFVALINWSSGTTVYADSVKGRFTISGDNAKDTVYLEMNSLKPEDTAVYYCAVGRRWSGSYYSALAYQYWGQGTQVTVSSGGGGSGGGSEVQLVESGGGLVQAGGALRLSCAASGRTFETYRMGWFRQAPGKEREFVALINWSSGTTVYADSVKGRFTISGDNAKDTVYLEMNSLKPEDTAVYYCAVGRRWSGSYYSALAYQYWGQGTQVTVSS

SEQ ID NO: 522 - protein, 259 aa, Artificial
  Nanobody sequence
EVQLVESGGGLVQAGGALRLSCAASGRTFETYRMGWFRQAPGKEREFVALINWSSGTTIYADSVKGRFTISGDNAKDTVYLEMNSLKPEDTAVYYCAVGRRWSGSYYSALAYQYWGQGTQVTVSSGGGGSGGGSEVQLVESGGGLVQAGGALRLSCAASGRTFETYRMGWFRQAPGKEREFVALINWSSGTTIYADSVKGRFTISGDNAKDTVYLEMNSLKPEDTAVYYCAVGRRWSGSYYSALAYQYWGQGTQVTVSS

SEQ ID NO: 523 - protein, 259 aa, Artificial
  Nanobody sequence
EVQLVESGGGLVQAGGALRLSCAASGRTFETYRMGWFRQAPGKEREFVALINWSSGTTIYADSVKGRFTISGDNAKDTVYLEMNSLKPEDTAVYYCAVGRRWSGSYYSALAYQYWGKGTQVTVSSGGGGSGGGSEVQLVESGGGLVQAGGALRLSCAASGRTFETYRMGWFRQAPGKEREFVALINWSSGTTIYADSVKGRFTISGDNAKDTVYLEMNSLKPEDTAVYYCAVGRRWSGSYYSALAYQYWGKGTQVTVSS

SEQ ID NO: 524 - protein, 259 aa, Artificial
  Nanobody sequence
EVQLVESGGGLVHAGGALRLSCAASGRAFETYRMGWFRQAPGKEREFVALINWSSGTTVYADSVKGRFTISGDNAKDTVYLEMNSLKPEDTAVYYCAVGRRWSGSYYSALAYQYWGQGTQVTVSSGGGGSGGGSEVQLVESGGGLVHAGGALRLSCAASGRAFETYRMGWFRQAPGKEREFVALINWSSGTTVYADSVKGRFTISGDNAKDTVYLEMNSLKPEDTAVYYCAVGRRWSGSYYSALAYQYWGQGTQVTVSS

SEQ ID NO: 525 - protein, 259 aa, Artificial
  Nanobody sequence
EVQLVESGGGLVQAGGALRPSCAASGRTFETYRMGWFRQAPGKEREFVALINWSSGTTVYADSVKGRFTISGDNAKDTVYLEMNSLKPEDTAVYYCAVGRRWSGSYYSALAYQYWGQGTQVTVSSGGGGSGGGSEVQLVESGGGLVQAGGALRPSCAASGRTFETYRMGWFRQAPGKEREFVALINWSSGTTVYADSVKGRFTISGDNAKDTVYLEMNSLKPEDTAVYYCAVGRRWSGSYYSALAYQYWGQGTQVTVSS

SEQ ID NO: 526 - protein, 259 aa, Artificial
  Nanobody sequence
EVQLVESGGGLVQAGGALRLSCAVSGRTFESYRMGWFRQAPGKEREFVSLINWSSGKTIYADSVKGRFTISGDNAKDTVYLEMNSLKPEDTAVYYCAVGRAWSGSYYSALAYQYWGQGTQVTVSSGGGGSGGGSEVQLVESGGGLVQAGGALRLSCAVSGRTFESYRMGWFRQAPGKEREFVSLINWSSGKTIYADSVKGRFTISGDNAKDTVYLEMNSLKPEDTAVYYCAVGRAWSGSYYSALAYQYWGQGTQVTVSS

SEQ ID NO: 527 - protein, 259 aa, Artificial
  Nanobody sequence
EVQLVESGGGLVQAGGALRLSCAASGRTFETYRMGWFRQAPGKEREFVALINWSSGITVYLDSVKGRFTISGDNAKDTVYLEMNSLKPEDTAVYYCAVGRAWSGSYYSALAYQYWGQGTQVTVSSGGGGSGGGSEVQLVESGGGLVQAGGALRLSCAASGRTFETYRMGWFRQAPGKEREFVALINWSSGITVYLDSVKGRFTISGDNAKDTVYLEMNSLKPEDTAVYYCAVGRAWSGSYYSALAYQYWGQGTQVTVSS

SEQ ID NO: 528 - protein, 259 aa, Artificial
  Nanobody sequence
EVQLMESGGGLVQAGGSLRLSCAVSGRTFESYRMGWFRQAPGKEREFVSLINWSSGKTIYADSVKGRFTISGDNAKDTVYLEMNSLKPEDTAVYYCAVGRAWSGSYYSALAYQYWGQGTQVTVSSGGGGSGGGSEVQLMESGGGLVQAGGSLRLSCAVSGRTFESYRMGWFRQAPGKEREFVSLINWSSGKTIYADSVKGRFTISGDNAKDTVYLEMNSLKPEDTAVYYCAVGRAWSGSYYSALAYQYWGQGTQVTVSS

SEQ ID NO: 529 - protein, 259 aa, Artificial
  Nanobody sequence
EVQLVESGGGSVQAGGALRLSCAVSGRTFESYRMGWFRQAPGKEREFVSLINWSSGKTIYADSVKGRFTISGDNAKDTVYLEMNSLKPEDTAVYYCAVGRAWSGSHYSALAYQYWGQGTQVTVSSGGGGSGGGSEVQLVESGGGSVQAGGALRLSCAVSGRTFESYRMGWFRQAPGKEREFVSLINWSSGKTIYADSVKGRFTISGDNAKDTVYLEMNSLKPEDTAVYYCAVGRAWSGSHYSALAYQYWGQGTQVTVSS

SEQ ID NO: 530 - protein, 261 aa, Artificial
  Nanobody sequence
EVQLVESGGGLVQTGGSLRLSCAASGRTFGTYAMAWFRQSPKNEREFVATLRWSDGSTYYADSVKGRFTIAGDNAKNTVYLQMNNLKPEDTAVYYCAADRWFSYTTYDATDTWHYWGQGTQVTVSSGGGGSGGGSEVQLVESGGGLVQTGGSLRLSCAASGRTFGTYAMAWFRQSPKNEREFVATLRWSDGSTYYADSVKGRFTIAGDNAKNTVYLQMNNLKPEDTAVYYCAADRWFSYTTYDATDTWHYWGQGTQVTVSS

SEQ ID NO: 531 - protein, 280 aa, Artificial
  Nanobody sequence
EVQLVESGGGLVQAGGSLRLSCAASGRTFSSLAMGWFRQAPGKDREFVVVVSGSGGTTKYADSVKGRFTISRDNNKNAVYLQMNSLKPEDTAVYYCAADPSRYFITTDRRGYDYWGQGTQVTVSSGGGGSGGGGSGGGGSGGGGSGGGGSGGGGSEVQLVESGGGLVQAGGSLRLSCAASGRTFSSLAMGWFRQAPGKDREFVVVVSGSGGTTKYADSVKGRFTISRDNNKNAVYLQMNSLKPEDTAVYYCAADPSRYFITTDRRGYDYWGQGTQVTVSS

SEQ ID NO: 532 - protein, 276 aa, Artificial
  Nanobody sequence
KVQLVESGGGLVQAGGSLRLSCAASGRSFSDNVMGWFRQAAGKEREFVAHISRGGSRTEYADSVKGRFTISRDNAKKTVYLQMNSLKPEDTAVYYCAASRGVALATARPYDYWGQGTQVTVSSGGGGSGGGGSGGGGSGGGGSGGGGSGGGGSKVQLVESGGGLVQAGGSLRLSCAASGRSFSDNVMGWFRQAAGKEREFVAHISRGGSRTEYADSVKGRFTISRDNAKKTVYLQMNSLKPEDTAVYYCAASRGVALATARPYDYWGQGTQVTVSS

SEQ ID NO: 533 - protein, 282 aa, Artificial
  Nanobody sequence
EVQLVESGGGLVQVGGSLRLSCAASGRTFSSARMGWFRQCPGKEREFVAAISWSNDITYYEDSVKGRFTISRDNAKATVYLQMNSLKLEDTAVYYCAASWRSSIWIPAESDSYDFWAQGTQVTVSSGGGGSGGGGSGGGGSGGGGSGGGGSGGGGSEVQLVESGGGLVQVGGSLRLSCAASGRTFSSARMGWFRQCPGKEREFVAAISWSNDITYYEDSVKGRFTISRDNAKATVYLQMNSLKLEDTAVYYCAASWRSSIWIPAESDSYDFWAQGTQVTVSS

SEQ ID NO: 534 - protein, 264 aa, Artificial
  Nanobody sequence
EVQLVESGGGLVQPGGSLRLACAVSGFTMSSSWMYWVRQAPGKGLEWVSSISPGGLFPYYVDSVKGRFSISTDNANNILYLQMNSLKPEDTALYSCAKGGAPNYTPRGRGTQVTVSSGGGGSGGGGSGGGGSGGGGSGGGGSGGGGSEVQLVESGGGLVQPGGSLRLACAVSGFTMSSSWMYWVRQAPGKGLEWVSSISPGGLFPYYVDSVKGRFSISTDNANNILYLQMNSLKPEDTALYSCAKGGAPNYTPRGRGTQVTVSS

SEQ ID NO: 535 - protein, 258 aa, Artificial
  Nanobody sequence
EVQLVESGGGLVQPGGSLRLSCAASGFTFSSYSMIWVRQAPGKGLEWVSEISSGGGWTSYADSVKGRFTISRDNAKNTLYLQMNSLKPEDTAVYYCVQSHRTPRSQGTQVTVSSGGGGSGGGGSGGGGSGGGGSGGGGSGGGGSEVQLVESGGGLVQPGGSLRLSCAASGFTFSSYSMIWVRQAPGKGLEWVSEISSGGGWTSYADSVKGRFTISRDNAKNTLYLQMNSLKPEDTAVYYCVQSHRTPRSQGTQVTVSS

SEQ ID NO: 536 - protein, 260 aa, Artificial
  Nanobody sequence
EVQLVESGGGLVQPGGSLRLSCAASGFTFSNYWMYWLRQAPGKGLESVSSINTGGARTFYADSVKGRFTISRDNAKNTLYLQMNSLKSEDTAVYYCAKDAAGRTRGQGTQVTVSSGGGGSGGGGSGGGGSGGGGSGGGGSGGGGSEVQLVESGGGLVQPGGSLRLSCAASGFTFSNYWMYWLRQAPGKGLESVSSINTGGARTFYADSVKGRFTISRDNAKNTLYLQMNSLKSEDTAVYYCAKDAAGRTRGQGTQVTVSS

SEQ ID NO: 537 - protein, 272 aa, Artificial
  Nanobody sequence
EVQLVESGGDLVQPGGSLRLSCAASGFTFSRYEMSWVRQAPGKGLEWVSGISTGGGWRTYADSVKGRFTISRDNAKNTLYLQMNSLKPEDTAVYYCLNRDYGTSWADFPSWGQGTQVTVSSGGGGSGGGGSGGGGSGGGGSGGGGSGGGGSEVQLVESGGDLVQPGGSLRLSCAASGFTFSRYEMSWVRQAPGKGLEWVSGISTGGGWRTYADSVKGRFTISRDNAKNTLYLQMNSLKPEDTAVYYCLNRDYGTSWADFPSWGQGTQVTVSS

SEQ ID NO: 538 - protein, 260 aa, Artificial
  Nanobody sequence
EVQLVESGGGLVQPGGSLRLSCAASGFTVSSYTMYWARQAPGKELEWVSIIFTNGEGTYYSDSVKGRFTVSRDNAKNTLYLQMNSLKPEDTALYYCARDPFGKLKGQGTQVTVSSGGGGSGGGGSGGGGSGGGGSGGGGSGGGGSEVQLVESGGGLVQPGGSLRLSCAASGFTVSSYTMYWARQAPGKELEWVSIIFTNGEGTYYSDSVKGRFTVSRDNAKNTLYLQMNSLKPEDTALYYCARDPFGKLKGQGTQVTVSS

SEQ ID NO: 539 - protein, 280 aa, Artificial
  Nanobody sequence
EVQLVESGGGLVQAGSSLRLSCVASGRSVSTYGMAWFRQAPGKEREFVAINRSTGTIYYADSVKGRFTISRDNAKNTLYLQMNSLKPGDTALYYCAADVFFSGAHRYEASQWHYWGQGTQVTVSSGGGGSGGGGSGGGGSGGGGSGGGGSGGGGSEVQLVESGGGLVQAGSSLRLSCVASGRSVSTYGMAWFRQAPGKEREFVAINRSTGTIYYADSVKGRFTISRDNAKNTLYLQMNSLKPGDTALYYCAADVFFSGAHRYEASQWHYWGQGTQVTVSS

SEQ ID NO: 540 - protein, 276 aa, Artificial
  Nanobody sequence
EVQLVESGGGLVQPGGSLRLSCAASVRTFSNYFMGWFRQAPGKEREFVATIGWSGTDYADSVKGRFTISRDNAKNTVYLQMNSLKPEDTAVYYCAAGYFKRLGPTSPRDYTYWGQGTQVTVSSGGGGSGGGGSGGGGSGGGGSGGGGSGGGGSEVQLVESGGGLVQPGGSLRLSCAASVRTFSNYFMGWFRQAPGKEREFVATIGWSGTDYADSVKGRFTISRDNAKNTVYLQMNSLKPEDTAVYYCAAGYFKRLGPTSPRDYTYWGQGTQVTVSS

SEQ ID NO: 541 - protein, 266 aa, Artificial
  Nanobody sequence
EVQLVESGGGLVQAGGSLRLSCVASGRTFGSYDMGWFRQAPGKEREFVAAISTGGGWRRYADSVKGRFTISRDNGKNTMYLQMNSLKPEDTAVYYCAQGWSLAEFRSWGQGTQVTVSSGGGGSGGGGSGGGGSGGGGSGGGGSGGGGSEVQLVESGGGLVQAGGSLRLSCVASGRTFGSYDMGWFRQAPGKEREFVAAISTGGGWRRYADSVKGRFTISRDNGKNTMYLQMNSLKPEDTAVYYCAQGWSLAEFRSWGQGTQVTVSS

SEQ ID NO: 542 - protein, 280 aa, Artificial
  Nanobody sequence
EVQLVESGGGLVQAGGSLRLSCAASARTFSSYAMSWFRQAPGKERDFVAVINWSGGSTYYADSVKGRFTISRDNAKNTVYLEMNSLKPEDTAVYYCASTAFRRRTYYTPESWDYWGQGTQVTVSSGGGGSGGGGSGGGGSGGGGSGGGGSGGGGSEVQLVESGGGLVQAGGSLRLSCAASARTFSSYAMSWFRQAPGKERDFVAVINWSGGSTYYADSVKGRFTISRDNAKNTVYLEMNSLKPEDTAVYYCASTAFRRRTYYTPESWDYWGQGTQVTVSS

SEQ ID NO: 543 - protein, 276 aa, Artificial
  Nanobody sequence
EVQLVESGGGLVQAGDSLRLSCAASGLTFSAYTMGWFRQAPGKEREFVSATSRSGGATLYTDSVKGRFTISRDNAKNTVDLQMNNLKPGDTAVYYCAAKSRPGYGGTLDYDYWGQGTQVTVSSGGGGSGGGGSGGGGSGGGGSGGGGSGGGGSEVQLVESGGGLVQAGDSLRLSCAASGLTFSAYTMGWFRQAPGKEREFVSATSRSGGATLYTDSVKGRFTISRDNAKNTVDLQMNNLKPGDTAVYYCAAKSRPGYGGTLDYDYWGQGTQVTVSS

SEQ ID NO: 544 - protein, 286 aa, Artificial
  Nanobody sequence
EVQLVESGGGLVQSGGSLRLSCAASGLAFSTYAMGWFRQAPGKDREMVIALNWSGDRTWYLNSVKGRFTISRDNAKNTVSLQMNSLKPEDTAVYYCAAKASGTIRGGSYYDSAGYSHWGQGTQVTVSSGGGGSGGGGSGGGGSGGGGSGGGGSGGGGSEVQLVESGGGLVQSGGSLRLSCAASGLAFSTYAMGWFRQAPGKDREMVIALNWSGDRTWYLNSVKGRFTISRDNAKNTVSLQMNSLKPEDTAVYYCAAKASGTIRGGSYYDSAGYSHWGQGTQVTVSS

SEQ ID NO: 545 - protein, 278 aa, Artificial
  Nanobody sequence
EVQLVESGGGLVQAGVSLRLSCAASGRTFGNYNMGWFRQAQGKDRELVAAIRWSEDRVWYLGSVRGRFTISRDNAKNTVYLQMNSLKPEDTAAYYCAAQDRRRGDYYTPDYHYWGQGTQVTVSSGGGGSGGGGSGGGGSGGGGSGGGGSGGGGSEVQLVESGGGLVQAGVSLRLSCAASGRTFGNYNMGWFRQAQGKDRELVAAIRWSEDRVWYLGSVRGRFTISRDNAKNTVYLQMNSLKPEDTAAYYCAAQDRRRGDYYTPDYHYWGQGTQVTVSS

SEQ ID NO: 546 - protein, 282 aa, Artificial
  Nanobody sequence
EVQLVESGGRLVQAGGSLRLSCAASGGIFSRYNMGWFRQAPGKEREFVAAAHWSGGRMWYKDSVKGRFTMSRDNNKNTVYLQMNSLKSEDTAVYYCAADSGAWGGSYYRAEEYVYWGQGTQVTVSSGGGGSGGGGSGGGGSGGGGSGGGGSGGGGSEVQLVESGGRLVQAGGSLRLSCAASGGIFSRYNMGWFRQAPGKEREFVAAAHWSGGRMWYKDSVKGRFTMSRDNNKNTVYLQMNSLKSEDTAVYYCAADSGAWGGSYYRAEEYVYWGQGTQVTVSS

SEQ ID NO: 547 - protein, 280 aa, Artificial
  Nanobody sequence
EVQLVESGGGLVQAGASLRLSCAASGRTFSSYDMGWFRQAPGKERALVAAITSSGGRRWYADSVLGRFTISRDNAKNTVSLQMSSLRPEDTAVYYCAARGRVDYNYYNKDAYTYWGQGTQVTVSSGGGGSGGGGSGGGGSGGGGSGGGGSGGGGSEVQLVESGGGLVQAGASLRLSCAASGRTFSSYDMGWFRQAPGKERALVAAITSSGGRRWYADSVLGRFTISRDNAKNTVSLQMSSLRPEDTAVYYCAARGRVDYNYYNKDAYTYWGQGTQVTVSS

SEQ ID NO: 548 - protein, 276 aa, Artificial
  Nanobody sequence
EVQLVESGGRLVQAGDSLRLSCAASGGTVRNYAMGWFRQAPGQEREILSSITRTDNITYYEDSVKGRFTIVRDTAKNTVYLQMNSLKPEDTAVYYCAAAMTHFAVLEREYGYWGQGTQVTVSSGGGGSGGGGSGGGGSGGGGSGGGGSGGGGSEVQLVESGGRLVQAGDSLRLSCAASGGTVRNYAMGWFRQAPGQEREILSSITRTDNITYYEDSVKGRFTIVRDTAKNTVYLQMNSLKPEDTAVYYCAAAMTHFAVLEREYGYWGQGTQVTVSS

SEQ ID NO: 549 - protein, 282 aa, Artificial
  Nanobody sequence
EVQLVESGGGLVQAGGSLRLSCAASGRTISSYTMGWFRQAPGKEREFVAAGTWSTSVTEYADSVKGRFTISRDTAKNTLYLQMNSLKPEDTAVYYCAAEPYIPVRTMRHMTFLTYWGQGTQVTVSSGGGGSGGGGSGGGGSGGGGSGGGGSGGGGSEVQLVESGGGLVQAGGSLRLSCAASGRTISSYTMGWFRQAPGKEREFVAAGTWSTSVTEYADSVKGRFTISRDTAKNTLYLQMNSLKPEDTAVYYCAAEPYIPVRTMRHMTFLTYWGQGTQVTVSS

SEQ ID NO: 550 - protein, 268 aa, Artificial
  Nanobody sequence
EVQLVESGGGLVQAGGSLRLSCAPSGRDISSYIMGWFRQAPGKEREFTADINWNGSWRFYAESVNGRFTISRDNAKNTVYLQMNSLKPEDTAVYYCAAKERGSGAYDYWGQGTQVTVSSGGGGSGGGGSGGGGSGGGGSGGGGSGGGGSEVQLVESGGGLVQAGGSLRLSCAPSGRDISSYIMGWFRQAPGKEREFTADINWNGSWRFYAESVNGRFTISRDNAKNTVYLQMNSLKPEDTAVYYCAAKERGSGAYDYWGQGTQVTVSS

SEQ ID NO: 551 - protein, 270 aa, Artificial
  Nanobody sequence
EVQLVESGGGLVQAGGSLRLSCTASGRALDTYTVTWFRQTPGKEREFVASNRWNAKPYTTDSVKGRFTISRDNAKNTVYLQMNSLKPEDTAVYYCAADLTTWADGPYRYWGQGTQVTVSSGGGGSGGGGSGGGGSGGGGSGGGGSGGGGSEVQLVESGGGLVQAGGSLRLSCTASGRALDTYTVTWFRQTPGKEREFVASNRWNAKPYTTDSVKGRFTISRDNAKNTVYLQMNSLKPEDTAVYYCAADLTTWADGPYRYWGQGTQVTVSS

SEQ ID NO: 552 - protein, 270 aa, Artificial
  Nanobody sequence
KVQLVESGGGLVQAGGSLRLSCAASGRALDTYTVTWFRQTPGKEREFVASIRWNAKPYTTDSVKGRFTISRDNAKNTVYLQMNSLKPEDTAIYYCAADLTTWADGPYRYWGQGTQVTVSSGGGGSGGGGSGGGGSGGGGSGGGGSGGGGSKVQLVESGGGLVQAGGSLRLSCAASGRALDTYTVTWFRQTPGKEREFVASIRWNAKPYTTDSVKGRFTISRDNAKNTVYLQMNSLKPEDTAIYYCAADLTTWADGPYRYWGQGTQVTVSS

SEQ ID NO: 553 - protein, 270 aa, Artificial
  Nanobody sequence
EVQLVESGGGLVQAGGSLRLSCTASGRALDTYTVTWFRQTPGKEREFVASNRWNAKPYVTDSVKGRFTISRDNAKNTVYLQMNSLKPEDTAVYYCAADLTTWADGPYRYWGQGTQVTVSSGGGGSGGGGSGGGGSGGGGSGGGGSGGGGSEVQLVESGGGLVQAGGSLRLSCTASGRALDTYTVTWFRQTPGKEREFVASNRWNAKPYVTDSVKGRFTISRDNAKNTVYLQMNSLKPEDTAVYYCAADLTTWADGPYRYWGQGTQVTVSS

SEQ ID NO: 554 - protein, 270 aa, Artificial
  Nanobody sequence
EVQLVESGGGLVQAGGSLRLSCAASGRALDTYTVTWFRQTPGKEREFVASDRWNAKPYTTDSVKGRFTISRDNAKNTVYLQMNSLKPEDTAVYYCAADLTTWADGPYRFWGQGTQVTVSSGGGGSGGGGSGGGGSGGGGSGGGGSGGGGSEVQLVESGGGLVQAGGSLRLSCAASGRALDTYTVTWFRQTPGKEREFVASDRWNAKPYTTDSVKGRFTISRDNAKNTVYLQMNSLKPEDTAVYYCAADLTTWADGPYRFWGQGTQVTVSS

SEQ ID NO: 555 - protein, 270 aa, Artificial
  Nanobody sequence
EVQLVESGGGLVQAGGSLRLSCAASGRALDTYTVTWFRQTPGKGREFLASIRWNAKPYTTDSVKGRFTMSRDNAKNTVYLQMNSLRPEDTAVYYCAADPTTWADGPYRYWGQGTQVTVSSGGGGSGGGGSGGGGSGGGGSGGGGSGGGGSEVQLVESGGGLVQAGGSLRLSCAASGRALDTYTVTWFRQTPGKGREFLASIRWNAKPYTTDSVKGRFTMSRDNAKNTVYLQMNSLRPEDTAVYYCAADPTTWADGPYRYWGQGTQVTVSS

SEQ ID NO: 556 - protein, 270 aa, Artificial
  Nanobody sequence
EVQLVESGGGLVQPGGSLRLSCAASGRALDTYTVTWFRQTPGKTREFVASVRWNAKPYTTDSVKGRFTISRDNAKNTVYLQMNSLKPEDTAVYYCAADPTTWADGPYRYWGQGTQVTVSSGGGGSGGGGSGGGGSGGGGSGGGGSGGGGSEVQLVESGGGLVQPGGSLRLSCAASGRALDTYTVTWFRQTPGKTREFVASVRWNAKPYTTDSVKGRFTISRDNAKNTVYLQMNSLKPEDTAVYYCAADPTTWADGPYRYWGQGTQVTVSS

SEQ ID NO: 557 - protein, 270 aa, Artificial
  Nanobody sequence
EVHLVESGGGLVQAGGSLRLSCAASGRALDTYTVTWFRQTPGKTREFVASVRWNAKPYTTDSVKGRFTISRDNAKNTVYLQMNSLKPEDTAVYYCAADPTTWADGPYRYWGQGTQVTVSSGGGGSGGGGSGGGGSGGGGSGGGGSGGGGSEVHLVESGGGLVQAGGSLRLSCAASGRALDTYTVTWFRQTPGKTREFVASVRWNAKPYTTDSVKGRFTISRDNAKNTVYLQMNSLKPEDTAVYYCAADPTTWADGPYRYWGQGTQVTVSS

SEQ ID NO: 558 - protein, 282 aa, Artificial
  Nanobody sequence
EVQLVESGGGLVQPGGSLRLSCAASGFTLDYYGIGWFRQAPGKEREWVSCISSSGGSTYYADSVKGRFTISRDNAKNTVYLQMNSLKPEDTAVYYCAAQKGTPPLGCPAYYGMDYWGKGTLVTVSSGGGGSGGGGSGGGGSGGGGSGGGGSGGGGSEVQLVESGGGLVQPGGSLRLSCAASGFTLDYYGIGWFRQAPGKEREWVSCISSSGGSTYYADSVKGRFTISRDNAKNTVYLQMNSLKPEDTAVYYCAAQKGTPPLGCPAYYGMDYWGKGTLVTVSS

SEQ ID NO: 559 - protein, 282 aa, Artificial
  Nanobody sequence
EVQLVESGGGLVQPGGSLRLSCAASGFTLDYYGIGWFRQAPGKEREWVSCISSSGGSTYYADSVKGRFTISRDNAKNTVYLQMNSLKPEDAAVYYCAAQKGTPPLGCPAYYGMDYWGKGTLVTVSSGGGGSGGGGSGGGGSGGGGSGGGGSGGGGSEVQLVESGGGLVQPGGSLRLSCAASGFTLDYYGIGWFRQAPGKEREWVSCISSSGGSTYYADSVKGRFTISRDNAKNTVYLQMNSLKPEDAAVYYCAAQKGTPPLGCPAYYGMDYWGKGTLVTVSS

SEQ ID NO: 560 - protein, 282 aa, Artificial
  Nanobody sequence
EVQLVESGGGLVQAGGSLRLSCAASGRTFSGVDVAWFRQAPGKEREFVAALAWSGIRTYYAVSVKGRFTISRGDPNDTVYLQMTSLKPEDTAVYYCATGRASRTSDYYTDRIYDSWGQGAQVTVSSGGGGSGGGGSGGGGSGGGGSGGGGSGGGGSEVQLVESGGGLVQAGGSLRLSCAASGRTFSGVDVAWFRQAPGKEREFVAALAWSGIRTYYAVSVKGRFTISRGDPNDTVYLQMTSLKPEDTAVYYCATGRASRTSDYYTDRIYDSWGQGAQVTVSS

SEQ ID NO: 561 - protein, 282 aa, Artificial
  Nanobody sequence
EVPMVESGGGLVQAGGSLRLSCAASGRTFSGVDVAWFRQAPGKEREFVAALAWSGIRTYYAVSVKGRFTISRGDPNDTVYLQMTSLKPEDTAVYYCATGRASRTSDYYTDRIYDSWGQGAQVTVSSGGGGSGGGGSGGGGSGGGGSGGGGSGGGGSEVPMVESGGGLVQAGGSLRLSCAASGRTFSGVDVAWFRQAPGKEREFVAALAWSGIRTYYAVSVKGRFTISRGDPNDTVYLQMTSLKPEDTAVYYCATGRASRTSDYYTDRIYDSWGQGAQVTVSS

SEQ ID NO: 562 - protein, 282 aa, Artificial
  Nanobody sequence
EVQLVESGGGLVQAGGSLRLSCAASGRTFSGVDVAWFRQATGKEREFVAALAWSGIRTYYAVSVKGRFTISRGDPNDTVYLQMTSLKPEDTAVYYCATGRASRTSDYYTDRIYDSWGQGAQVTVSSGGGGSGGGGSGGGGSGGGGSGGGGSGGGGSEVQLVESGGGLVQAGGSLRLSCAASGRTFSGVDVAWFRQATGKEREFVAALAWSGIRTYYAVSVKGRFTISRGDPNDTVYLQMTSLKPEDTAVYYCATGRASRTSDYYTDRIYDSWGQGAQVTVSS

SEQ ID NO: 563 - protein, 282 aa, Artificial
  Nanobody sequence
EVQLVESGGGLVQAGGSLRLSCAASGRTFSGVDVAWFRQAPGKEREFVAALAWSGIRTYYAVSVKGRFTISRGDPNDTVYLQMTSLKPEDTAVYYCATGRASSTSDYYTDRIYDSWGQGAQVTVSSGGGGSGGGGSGGGGSGGGGSGGGGSGGGGSEVQLVESGGGLVQAGGSLRLSCAASGRTFSGVDVAWFRQAPGKEREFVAALAWSGIRTYYAVSVKGRFTISRGDPNDTVYLQMTSLKPEDTAVYYCATGRASSTSDYYTDRIYDSWGQGAQVTVSS

SEQ ID NO: 564 - protein, 282 aa, Artificial
  Nanobody sequence
EVQLVESGGGLVQAGGSLRLSCAASGRTFSGVDVAWFRQAPGKEREFVAALAWSGIRTYYAVSVKGRFTISRGNPNDTVYLQMTSLKPEDTAVYYCATGRAYRGSDYYTDRIYDSWGQGAQVTVSSGGGGSGGGGSGGGGSGGGGSGGGGSGGGGSEVQLVESGGGLVQAGGSLRLSCAASGRTFSGVDVAWFRQAPGKEREFVAALAWSGIRTYYAVSVKGRFTISRGNPNDTVYLQMTSLKPEDTAVYYCATGRAYRGSDYYTDRIYDSWGQGAQVTVSS

SEQ ID NO: 565 - protein, 276 aa, Artificial
  Nanobody sequence
EVQLVESGGGLVQPGGSLRLSCAASGRALSSYSVGWFRQAPGKEREFVTAISWSVPYYADSVKGRFTISRDNAKNTVYLQMNSLKPEDTAVYYCAADSLYWRSSRMATDYDYWGQGTQVTVSSGGGGSGGGGSGGGGSGGGGSGGGGSGGGGSEVQLVESGGGLVQPGGSLRLSCAASGRALSSYSVGWFRQAPGKEREFVTAISWSVPYYADSVKGRFTISRDNAKNTVYLQMNSLKPEDTAVYYCAADSLYWRSSRMATDYDYWGQGTQVTVSS

SEQ ID NO: 566 - protein, 280 aa, Artificial
  Nanobody sequence
EVQLVESGGGLVQAGGALRLSCAASGRTFETYRMGWFRQAPGKEREFVALINWSSGTTVYADSVKGRFTISGDNAKDTVYLEMNSLKPEDTAVYYCAVGRRWSGSYYSALAYQYWGQGTQVTVSSGGGGSGGGGSGGGGSGGGGSGGGGSGGGGSEVQLVESGGGLVQAGGALRLSCAASGRTFETYRMGWFRQAPGKEREFVALINWSSGTTVYADSVKGRFTISGDNAKDTVYLEMNSLKPEDTAVYYCAVGRRWSGSYYSALAYQYWGQGTQVTVSS

SEQ ID NO: 567 - protein, 280 aa, Artificial
  Nanobody sequence
EVQLVESGGGLVQAGGALRLSCAASGRTFETYRMGWFRQAPGKEREFVALINWSSGTTIYADSVKGRFTISGDNAKDTVYLEMNSLKPEDTAVYYCAVGRRWSGSYYSALAYQYWGQGTQVTVSSGGGGSGGGGSGGGGSGGGGSGGGGSGGGGSEVQLVESGGGLVQAGGALRLSCAASGRTFETYRMGWFRQAPGKEREFVALINWSSGTTIYADSVKGRFTISGDNAKDTVYLEMNSLKPEDTAVYYCAVGRRWSGSYYSALAYQYWGQGTQVTVSS

SEQ ID NO: 568 - protein, 280 aa, Artificial
  Nanobody sequence
EVQLVESGGGLVQAGGALRLSCAASGRTFETYRMGWFRQAPGKEREFVALINWSSGTTIYADSVKGRFTISGDNAKDTVYLEMNSLKPEDTAVYYCAVGRRWSGSYYSALAYQYWGKGTQVTVSSGGGGSGGGGSGGGGSGGGGSGGGGSGGGGSEVQLVESGGGLVQAGGALRLSCAASGRTFETYRMGWFRQAPGKEREFVALINWSSGTTIYADSVKGRFTISGDNAKDTVYLEMNSLKPEDTAVYYCAVGRRWSGSYYSALAYQYWGKGTQVTVSS

SEQ ID NO: 569 - protein, 280 aa, Artificial
  Nanobody sequence
EVQLVESGGGLVHAGGALRLSCAASGRAFETYRMGWFRQAPGKEREFVALINWSSGTTVYADSVKGRFTISGDNAKDTVYLEMNSLKPEDTAVYYCAVGRRWSGSYYSALAYQYWGQGTQVTVSSGGGGSGGGGSGGGGSGGGGSGGGGSGGGGSEVQLVESGGGLVHAGGALRLSCAASGRAFETYRMGWFRQAPGKEREFVALINWSSGTTVYADSVKGRFTISGDNAKDTVYLEMNSLKPEDTAVYYCAVGRRWSGSYYSALAYQYWGQGTQVTVSS

SEQ ID NO: 570 - protein, 280 aa, Artificial
  Nanobody sequence
EVQLVESGGGLVQAGGALRPSCAASGRTFETYRMGWFRQAPGKEREFVALINWSSGTTVYADSVKGRFTISGDNAKDTVYLEMNSLKPEDTAVYYCAVGRRWSGSYYSALAYQYWGQGTQVTVSSGGGGSGGGGSGGGGSGGGGSGGGGSGGGGSEVQLVESGGGLVQAGGALRPSCAASGRTFETYRMGWFRQAPGKEREFVALINWSSGTTVYADSVKGRFTISGDNAKDTVYLEMNSLKPEDTAVYYCAVGRRWSGSYYSALAYQYWGQGTQVTVSS

SEQ ID NO: 571 - protein, 280 aa, Artificial
  Nanobody sequence
EVQLVESGGGLVQAGGALRLSCAVSGRTFESYRMGWFRQAPGKEREFVSLINWSSGKTIYADSVKGRFTISGDNAKDTVYLEMNSLKPEDTAVYYCAVGRAWSGSYYSALAYQYWGQGTQVTVSSGGGGSGGGGSGGGGSGGGGSGGGGSGGGGSEVQLVESGGGLVQAGGALRLSCAVSGRTFESYRMGWFRQAPGKEREFVSLINWSSGKTIYADSVKGRFTISGDNAKDTVYLEMNSLKPEDTAVYYCAVGRAWSGSYYSALAYQYWGQGTQVTVSS

SEQ ID NO: 572 - protein, 280 aa, Artificial
  Nanobody sequence
EVQLVESGGGLVQAGGALRLSCAASGRTFETYRMGWFRQAPGKEREFVALINWSSGITVYLDSVKGRFTISGDNAKDTVYLEMNSLKPEDTAVYYCAVGRAWSGSYYSALAYQYWGQGTQVTVSSGGGGSGGGGSGGGGSGGGGSGGGGSGGGGSEVQLVESGGGLVQAGGALRLSCAASGRTFETYRMGWFRQAPGKEREFVALINWSSGITVYLDSVKGRFTISGDNAKDTVYLEMNSLKPEDTAVYYCAVGRAWSGSYYSALAYQYWGQGTQVTVSS

SEQ ID NO: 573 - protein, 280 aa, Artificial
  Nanobody sequence
EVQLMESGGGLVQAGGSLRLSCAVSGRTFESYRMGWFRQAPGKEREFVSLINWSSGKTIYADSVKGRFTISGDNAKDTVYLEMNSLKPEDTAVYYCAVGRAWSGSYYSALAYQYWGQGTQVTVSSGGGGSGGGGSGGGGSGGGGSGGGGSGGGGSEVQLMESGGGLVQAGGSLRLSCAVSGRTFESYRMGWFRQAPGKEREFVSLINWSSGKTIYADSVKGRFTISGDNAKDTVYLEMNSLKPEDTAVYYCAVGRAWSGSYYSALAYQYWGQGTQVTVSS

SEQ ID NO: 574 - protein, 280 aa, Artificial
  Nanobody sequence
EVQLVESGGGSVQAGGALRLSCAVSGRTFESYRMGWFRQAPGKEREFVSLINWSSGKTIYADSVKGRFTISGDNAKDTVYLEMNSLKPEDTAVYYCAVGRAWSGSHYSALAYQYWGQGTQVTVSSGGGGSGGGGSGGGGSGGGGSGGGGSGGGGSEVQLVESGGGSVQAGGALRLSCAVSGRTFESYRMGWFRQAPGKEREFVSLINWSSGKTIYADSVKGRFTISGDNAKDTVYLEMNSLKPEDTAVYYCAVGRAWSGSHYSALAYQYWGQGTQVTVSS

SEQ ID NO: 575 - protein, 282 aa, Artificial
  Nanobody sequence
EVQLVESGGGLVQTGGSLRLSCAASGRTFGTYAMAWFRQSPKNEREFVATLRWSDGSTYYADSVKGRFTIAGDNAKNTVYLQMNNLKPEDTAVYYCAADRWFSYTTYDATDTWHYWGQGTQVTVSSGGGGSGGGGSGGGGSGGGGSGGGGSGGGGSEVQLVESGGGLVQTGGSLRLSCAASGRTFGTYAMAWFRQSPKNEREFVATLRWSDGSTYYADSVKGRFTIAGDNAKNTVYLQMNNLKPEDTAVYYCAADRWFSYTTYDATDTWHYWGQGTQVTVSS

SEQ ID NO: 576 - protein, 249 aa, Artificial
  Nanobody sequence
EVQLVESGGGLVQAGGSLRLSCAASGRTFSSLAMGWFRQAPGKDREFVVVVSGSGGTTKYADSVKGRFTISRDNNKNAVYLQMNSLKPEDTAVYYCAADPSRYFITTDRRGYDYWGQGTQVTVSSGGGGSGGGSEVQLVESGGGLVQPGNSLRLSCAASGFTFSSFGMSWVRQAPGKGLEWVSSISGSGSDTLYADSVKGRFTISRDNAKTTLYLQMNSLRPEDTAVYYCTIGGSLSRSSQGTLVTVSS

SEQ ID NO: 577 - protein, 249 aa, Artificial
  Nanobody sequence
EVQLVESGGGLVQPGNSLRLSCAASGFTFSSFGMSWVRQAPGKGLEWVSSISGSGSDTLYADSVKGRFTISRDNAKTTLYLQMNSLRPEDTAVYYCTIGGSLSRSSQGTLVTVSSGGGGSGGGSEVQLVESGGGLVQAGGSLRLSCAASGRTFSSLAMGWFRQAPGKDREFVVVVSGSGGTTKYADSVKGRFTISRDNNKNAVYLQMNSLKPEDTAVYYCAADPSRYFITTDRRGYDYWGQGTQVTVSS

SEQ ID NO: 578 - protein, 247 aa, Artificial
  Nanobody sequence
KVQLVESGGGLVQAGGSLRLSCAASGRSFSDNVMGWFRQAAGKEREFVAHISRGGSRTEYADSVKGRFTISRDNAKKTVYLQMNSLKPEDTAVYYCAASRGVALATARPYDYWGQGTQVTVSSGGGGSGGGSEVQLVESGGGLVQPGNSLRLSCAASGFTFSSFGMSWVRQAPGKGLEWVSSISGSGSDTLYADSVKGRFTISRDNAKTTLYLQMNSLRPEDTAVYYCTIGGSLSRSSQGTLVTVSS

SEQ ID NO: 579 - protein, 247 aa, Artificial
  Nanobody sequence
EVQLVESGGGLVQPGNSLRLSCAASGFTFSSFGMSWVRQAPGKGLEWVSSISGSGSDTLYADSVKGRFTISRDNAKTTLYLQMNSLRPEDTAVYYCTIGGSLSRSSQGTLVTVSSGGGGSGGGSKVQLVESGGGLVQAGGSLRLSCAASGRSFSDNVMGWFRQAAGKEREFVAHISRGGSRTEYADSVKGRFTISRDNAKKTVYLQMNSLKPEDTAVYYCAASRGVALATARPYDYWGQGTQVTVSS

SEQ ID NO: 580 - protein, 250 aa, Artificial
  Nanobody sequence
EVQLVESGGGLVQVGGSLRLSCAASGRTFSSARMGWFRQCPGKEREFVAAISWSNDITYYEDSVKGRFTISRDNAKATVYLQMNSLKLEDTAVYYCAASWRSSIWIPAESDSYDFWAQGTQVTVSSGGGGSGGGSEVQLVESGGGLVQPGNSLRLSCAASGFTFSSFGMSWVRQAPGKGLEWVSSISGSGSDTLYADSVKGRFTISRDNAKTTLYLQMNSLRPEDTAVYYCTIGGSLSRSSQGTLVTVSS

SEQ ID NO: 581 - protein, 250 aa, Artificial
  Nanobody sequence
EVQLVESGGGLVQPGNSLRLSCAASGFTFSSFGMSWVRQAPGKGLEWVSSISGSGSDTLYADSVKGRFTISRDNAKTTLYLQMNSLRPEDTAVYYCTIGGSLSRSSQGTLVTVSSGGGGSGGGSEVQLVESGGGLVQVGGSLRLSCAASGRTFSSARMGWFRQCPGKEREFVAAISWSNDITYYEDSVKGRFTISRDNAKATVYLQMNSLKLEDTAVYYCAASWRSSIWIPAESDSYDFWAQGTQVTVSS

SEQ ID NO: 582 - protein, 241 aa, Artificial
  Nanobody sequence
EVQLVESGGGLVQPGGSLRLACAVSGFTMSSSWMYWVRQAPGKGLEWVSSISPGGLFPYYVDSVKGRFSISTDNANNILYLQMNSLKPEDTALYSCAKGGAPNYTPRGRGTQVTVSSGGGGSGGGSEVQLVESGGGLVQPGNSLRLSCAASGFTFSSFGMSWVRQAPGKGLEWVSSISGSGSDTLYADSVKGRFTISRDNAKTTLYLQMNSLRPEDTAVYYCTIGGSLSRSSQGTLVTVSS

SEQ ID NO: 583 - protein, 241 aa, Artificial
  Nanobody sequence
EVQLVESGGGLVQPGNSLRLSCAASGFTFSSFGMSWVRQAPGKGLEWVSSISGSGSDTLYADSVKGRFTISRDNAKTTLYLQMNSLRPEDTAVYYCTIGGSLSRSSQGTLVTVSSGGGGSGGGSEVQLVESGGGLVQPGGSLRLACAVSGFTMSSSWMYWVRQAPGKGLEWVSSISPGGLFPYYVDSVKGRFSISTDNANNILYLQMNSLKPEDTALYSCAKGGAPNYTPRGRGTQVTVSS

SEQ ID NO: 584 - protein, 238 aa, Artificial
  Nanobody sequence
EVQLVESGGGLVQPGGSLRLSCAASGFTFSSYSMIWVRQAPGKGLEWVSEISSGGGWTSYADSVKGRFTISRDNAKNTLYLQMNSLKPEDTAVYYCVQSHRTPRSQGTQVTVSSGGGGSGGGSEVQLVESGGGLVQPGNSLRLSCAASGFTFSSFGMSWVRQAPGKGLEWVSSISGSGSDTLYADSVKGRFTISRDNAKTTLYLQMNSLRPEDTAVYYCTIGGSLSRSSQGTLVTVSS

SEQ ID NO: 585 - protein, 238 aa, Artificial
  Nanobody sequence
EVQLVESGGGLVQPGNSLRLSCAASGFTFSSFGMSWVRQAPGKGLEWVSSISGSGSDTLYADSVKGRFTISRDNAKTTLYLQMNSLRPEDTAVYYCTIGGSLSRSSQGTLVTVSSGGGGSGGGSEVQLVESGGGLVQPGGSLRLSCAASGFTFSSYSMIWVRQAPGKGLEWVSEISSGGGWTSYADSVKGRFTISRDNAKNTLYLQMNSLKPEDTAVYYCVQSHRTPRSQGTQVTVSS

SEQ ID NO: 586 - protein, 239 aa, Artificial
  Nanobody sequence
EVQLVESGGGLVQPGGSLRLSCAASGFTFSNYWMYWLRQAPGKGLESVSSINTGGARTFYADSVKGRFTISRDNAKNTLYLQMNSLKSEDTAVYYCAKDAAGRTRGQGTQVTVSSGGGGSGGGSEVQLVESGGGLVQPGNSLRLSCAASGFTFSSFGMSWVRQAPGKGLEWVSSISGSGSDTLYADSVKGRFTISRDNAKTTLYLQMNSLRPEDTAVYYCTIGGSLSRSSQGTLVTVSS

SEQ ID NO: 587 - protein, 239 aa, Artificial
  Nanobody sequence
EVQLVESGGGLVQPGNSLRLSCAASGFTFSSFGMSWVRQAPGKGLEWVSSISGSGSDTLYADSVKGRFTISRDNAKTTLYLQMNSLRPEDTAVYYCTIGGSLSRSSQGTLVTVSSGGGGSGGGSEVQLVESGGGLVQPGGSLRLSCAASGFTFSNYWMYWLRQAPGKGLESVSSINTGGARTFYADSVKGRFTISRDNAKNTLYLQMNSLKSEDTAVYYCAKDAAGRTRGQGTQVTVSS

SEQ ID NO: 588 - protein, 245 aa, Artificial
  Nanobody sequence
EVQLVESGGDLVQPGGSLRLSCAASGFTFSRYEMSWVRQAPGKGLEWVSGISTGGGWRTYADSVKGRFTISRDNAKNTLYLQMNSLKPEDTAVYYCLNRDYGTSWADFPSWGQGTQVTVSSGGGGSGGGSEVQLVESGGGLVQPGNSLRLSCAASGFTFSSFGMSWVRQAPGKGLEWVSSISGSGSDTLYADSVKGRFTISRDNAKTTLYLQMNSLRPEDTAVYYCTIGGSLSRSSQGTLVTVSS

SEQ ID NO: 589 - protein, 245 aa, Artificial
  Nanobody sequence
EVQLVESGGGLVQPGNSLRLSCAASGFTFSSFGMSWVRQAPGKGLEWVSSISGSGSDTLYADSVKGRFTISRDNAKTTLYLQMNSLRPEDTAVYYCTIGGSLSRSSQGTLVTVSSGGGGSGGGSEVQLVESGGDLVQPGGSLRLSCAASGFTFSRYEMSWVRQAPGKGLEWVSGISTGGGWRTYADSVKGRFTISRDNAKNTLYLQMNSLKPEDTAVYYCLNRDYGTSWADFPSWGQGTQVTVSS

SEQ ID NO: 590 - protein, 239 aa, Artificial
  Nanobody sequence
EVQLVESGGGLVQPGGSLRLSCAASGFTVSSYTMYWARQAPGKELEWVSIIFTNGEGTYYSDSVKGRFTVSRDNAKNTLYLQMNSLKPEDTALYYCARDPFGKLKGQGTQVTVSSGGGGSGGGSEVQLVESGGGLVQPGNSLRLSCAASGFTFSSFGMSWVRQAPGKGLEWVSSISGSGSDTLYADSVKGRFTISRDNAKTTLYLQMNSLRPEDTAVYYCTIGGSLSRSSQGTLVTVSS

SEQ ID NO: 591 - protein, 239 aa, Artificial
  Nanobody sequence
EVQLVESGGGLVQPGNSLRLSCAASGFTFSSFGMSWVRQAPGKGLEWVSSISGSGSDTLYADSVKGRFTISRDNAKTTLYLQMNSLRPEDTAVYYCTIGGSLSRSSQGTLVTVSSGGGGSGGGSEVQLVESGGGLVQPGGSLRLSCAASGFTVSSYTMYWARQAPGKELEWVSIIFTNGEGTYYSDSVKGRFTVSRDNAKNTLYLQMNSLKPEDTALYYCARDPFGKLKGQGTQVTVSS

SEQ ID NO: 592 - protein, 249 aa, Artificial
  Nanobody sequence
EVQLVESGGGLVQAGSSLRLSCVASGRSVSTYGMAWFRQAPGKEREFVAINRSTGTIYYADSVKGRFTISRDNAKNTLYLQMNSLKPGDTALYYCAADVFFSGAHRYEASQWHYWGQGTQVTVSSGGGGSGGGSEVQLVESGGGLVQPGNSLRLSCAASGFTFSSFGMSWVRQAPGKGLEWVSSISGSGSDTLYADSVKGRFTISRDNAKTTLYLQMNSLRPEDTAVYYCTIGGSLSRSSQGTLVTVSS

SEQ ID NO: 593 - protein, 249 aa, Artificial
  Nanobody sequence
EVQLVESGGGLVQPGNSLRLSCAASGFTFSSFGMSWVRQAPGKGLEWVSSISGSGSDTLYADSVKGRFTISRDNAKTTLYLQMNSLRPEDTAVYYCTIGGSLSRSSQGTLVTVSSGGGGSGGGSEVQLVESGGGLVQAGSSLRLSCVASGRSVSTYGMAWFRQAPGKEREFVAINRSTGTIYYADSVKGRFTISRDNAKNTLYLQMNSLKPGDTALYYCAADVFFSGAHRYEASQWHYWGQGTQVTVSS

SEQ ID NO: 594 - protein, 247 aa, Artificial
  Nanobody sequence
EVQLVESGGGLVQPGGSLRLSCAASVRTFSNYFMGWFRQAPGKEREFVATIGWSGTDYADSVKGRFTISRDNAKNTVYLQMNSLKPEDTAVYYCAAGYFKRLGPTSPRDYTYWGQGTQVTVSSGGGGSGGGSEVQLVESGGGLVQPGNSLRLSCAASGFTFSSFGMSWVRQAPGKGLEWVSSISGSGSDTLYADSVKGRFTISRDNAKTTLYLQMNSLRPEDTAVYYCTIGGSLSRSSQGTLVTVSS

SEQ ID NO: 595 - protein, 247 aa, Artificial
  Nanobody sequence
EVQLVESGGGLVQPGNSLRLSCAASGFTFSSFGMSWVRQAPGKGLEWVSSISGSGSDTLYADSVKGRFTISRDNAKTTLYLQMNSLRPEDTAVYYCTIGGSLSRSSQGTLVTVSSGGGGSGGGSEVQLVESGGGLVQPGGSLRLSCAASVRTFSNYFMGWFRQAPGKEREFVATIGWSGTDYADSVKGRFTISRDNAKNTVYLQMNSLKPEDTAVYYCAAGYFKRLGPTSPRDYTYWGQGTQVTVSS

SEQ ID NO: 596 - protein, 242 aa, Artificial
  Nanobody sequence
EVQLVESGGGLVQAGGSLRLSCVASGRTFGSYDMGWFRQAPGKEREFVAAISTGGGWRRYADSVKGRFTISRDNGKNTMYLQMNSLKPEDTAVYYCAQGWSLAEFRSWGQGTQVTVSSGGGGSGGGSEVQLVESGGGLVQPGNSLRLSCAASGFTFSSFGMSWVRQAPGKGLEWVSSISGSGSDTLYADSVKGRFTISRDNAKTTLYLQMNSLRPEDTAVYYCTIGGSLSRSSQGTLVTVSS

SEQ ID NO: 597 - protein, 242 aa, Artificial
  Nanobody sequence
EVQLVESGGGLVQPGNSLRLSCAASGFTFSSFGMSWVRQAPGKGLEWVSSISGSGSDTLYADSVKGRFTISRDNAKTTLYLQMNSLRPEDTAVYYCTIGGSLSRSSQGTLVTVSSGGGGSGGGSEVQLVESGGGLVQAGGSLRLSCVASGRTFGSYDMGWFRQAPGKEREFVAAISTGGGWRRYADSVKGRFTISRDNGKNTMYLQMNSLKPEDTAVYYCAQGWSLAEFRSWGQGTQVTVSS

SEQ ID NO: 598 - protein, 249 aa, Artificial
  Nanobody sequence
EVQLVESGGGLVQAGGSLRLSCAASARTFSSYAMSWFRQAPGKERDFVAVINWSGGSTYYADSVKGRFTISRDNAKNTVYLEMNSLKPEDTAVYYCASTAFRRRTYYTPESWDYWGQGTQVTVSSGGGGSGGGSEVQLVESGGGLVQPGNSLRLSCAASGFTFSSFGMSWVRQAPGKGLEWVSSISGSGSDTLYADSVKGRFTISRDNAKTTLYLQMNSLRPEDTAVYYCTIGGSLSRSSQGTLVTVSS

SEQ ID NO: 599 - protein, 249 aa, Artificial
  Nanobody sequence
EVQLVESGGGLVQPGNSLRLSCAASGFTFSSFGMSWVRQAPGKGLEWVSSISGSGSDTLYADSVKGRFTISRDNAKTTLYLQMNSLRPEDTAVYYCTIGGSLSRSSQGTLVTVSSGGGGSGGGSEVQLVESGGGLVQAGGSLRLSCAASARTFSSYAMSWFRQAPGKERDFVAVINWSGGSTYYADSVKGRFTISRDNAKNTVYLEMNSLKPEDTAVYYCASTAFRRRTYYTPESWDYWGQGTQVTVSS

SEQ ID NO: 600 - protein, 247 aa, Artificial
  Nanobody sequence
EVQLVESGGGLVQAGDSLRLSCAASGLTFSAYTMGWFRQAPGKEREFVSATSRSGGATLYTDSVKGRFTISRDNAKNTVDLQMNNLKPGDTAVYYCAAKSRPGYGGTLDYDYWGQGTQVTVSSGGGGSGGGSEVQLVESGGGLVQPGNSLRLSCAASGFTFSSFGMSWVRQAPGKGLEWVSSISGSGSDTLYADSVKGRFTISRDNAKTTLYLQMNSLRPEDTAVYYCTIGGSLSRSSQGTLVTVSS

SEQ ID NO: 601 - protein, 247 aa, Artificial
  Nanobody sequence
EVQLVESGGGLVQPGNSLRLSCAASGFTFSSFGMSWVRQAPGKGLEWVSSISGSGSDTLYADSVKGRFTISRDNAKTTLYLQMNSLRPEDTAVYYCTIGGSLSRSSQGTLVTVSSGGGGSGGGSEVQLVESGGGLVQAGDSLRLSCAASGLTFSAYTMGWFRQAPGKEREFVSATSRSGGATLYTDSVKGRFTISRDNAKNTVDLQMNNLKPGDTAVYYCAAKSRPGYGGTLDYDYWGQGTQVTVSS

SEQ ID NO: 602 - protein, 252 aa, Artificial
  Nanobody sequence
EVQLVESGGGLVQSGGSLRLSCAASGLAFSTYAMGWFRQAPGKDREMVIALNWSGDRTWYLNSVKGRFTISRDNAKNTVSLQMNSLKPEDTAVYYCAAKASGTIRGGSYYDSAGYSHWGQGTQVTVSSGGGGSGGGSEVQLVESGGGLVQPGNSLRLSCAASGFTFSSFGMSWVRQAPGKGLEWVSSISGSGSDTLYADSVKGRFTISRDNAKTTLYLQMNSLRPEDTAVYYCTIGGSLSRSSQGTLVTVSS

SEQ ID NO: 603 - protein, 252 aa, Artificial
  Nanobody sequence
EVQLVESGGGLVQPGNSLRLSCAASGFTFSSFGMSWVRQAPGKGLEWVSSISGSGSDTLYADSVKGRFTISRDNAKTTLYLQMNSLRPEDTAVYYCTIGGSLSRSSQGTLVTVSSGGGGSGGGSEVQLVESGGGLVQSGGSLRLSCAASGLAFSTYAMGWFRQAPGKDREMVIALNWSGDRTWYLNSVKGRFTISRDNAKNTVSLQMNSLKPEDTAVYYCAAKASGTIRGGSYYDSAGYSHWGQGTQVTVSS

SEQ ID NO: 604 - protein, 248 aa, Artificial
  Nanobody sequence
EVQLVESGGGLVQAGVSLRLSCAASGRTFGNYNMGWFRQAQGKDRELVAAIRWSEDRVWYLGSVRGRFTISRDNAKNTVYLQMNSLKPEDTAAYYCAAQDRRRGDYYTPDYHYWGQGTQVTVSSGGGGSGGGSEVQLVESGGGLVQPGNSLRLSCAASGFTFSSFGMSWVRQAPGKGLEWVSSISGSGSDTLYADSVKGRFTISRDNAKTTLYLQMNSLRPEDTAVYYCTIGGSLSRSSQGTLVTVSS

SEQ ID NO: 605 - protein, 248 aa, Artificial
  Nanobody sequence
EVQLVESGGGLVQPGNSLRLSCAASGFTFSSFGMSWVRQAPGKGLEWVSSISGSGSDTLYADSVKGRFTISRDNAKTTLYLQMNSLRPEDTAVYYCTIGGSLSRSSQGTLVTVSSGGGGSGGGSEVQLVESGGGLVQAGVSLRLSCAASGRTFGNYNMGWFRQAQGKDRELVAAIRWSEDRVWYLGSVRGRFTISRDNAKNTVYLQMNSLKPEDTAAYYCAAQDRRRGDYYTPDYHYWGQGTQVTVSS

SEQ ID NO: 606 - protein, 250 aa, Artificial
  Nanobody sequence
EVQLVESGGRLVQAGGSLRLSCAASGGIFSRYNMGWFRQAPGKEREFVAAAHWSGGRMWYKDSVKGRFTMSRDNNKNTVYLQMNSLKSEDTAVYYCAADSGAWGGSYYRAEEYVYWGQGTQVTVSSGGGGSGGGSEVQLVESGGGLVQPGNSLRLSCAASGFTFSSFGMSWVRQAPGKGLEWVSSISGSGSDTLYADSVKGRFTISRDNAKTTLYLQMNSLRPEDTAVYYCTIGGSLSRSSQGTLVTVSS

SEQ ID NO: 607 - protein, 250 aa, Artificial
  Nanobody sequence
EVQLVESGGGLVQPGNSLRLSCAASGFTFSSFGMSWVRQAPGKGLEWVSSISGSGSDTLYADSVKGRFTISRDNAKTTLYLQMNSLRPEDTAVYYCTIGGSLSRSSQGTLVTVSSGGGGSGGGSEVQLVESGGRLVQAGGSLRLSCAASGGIFSRYNMGWFRQAPGKEREFVAAAHWSGGRMWYKDSVKGRFTMSRDNNKNTVYLQMNSLKSEDTAVYYCAADSGAWGGSYYRAEEYVYWGQGTQVTVSS

SEQ ID NO: 608 - protein, 249 aa, Artificial
  Nanobody sequence
EVQLVESGGGLVQAGASLRLSCAASGRTFSSYDMGWFRQAPGKERALVAAITSSGGRRWYADSVLGRFTISRDNAKNTVSLQMSSLRPEDTAVYYCAARGRVDYNYYNKDAYTYWGQGTQVTVSSGGGGSGGGSEVQLVESGGGLVQPGNSLRLSCAASGFTFSSFGMSWVRQAPGKGLEWVSSISGSGSDTLYADSVKGRFTISRDNAKTTLYLQMNSLRPEDTAVYYCTIGGSLSRSSQGTLVTVSS

SEQ ID NO: 609 - protein, 249 aa, Artificial
  Nanobody sequence
EVQLVESGGGLVQPGNSLRLSCAASGFTFSSFGMSWVRQAPGKGLEWVSSISGSGSDTLYADSVKGRFTISRDNAKTTLYLQMNSLRPEDTAVYYCTIGGSLSRSSQGTLVTVSSGGGGSGGGSEVQLVESGGGLVQAGASLRLSCAASGRTFSSYDMGWFRQAPGKERALVAAITSSGGRRWYADSVLGRFTISRDNAKNTVSLQMSSLRPEDTAVYYCAARGRVDYNYYNKDAYTYWGQGTQVTVSS

SEQ ID NO: 610 - protein, 247 aa, Artificial
  Nanobody sequence
EVQLVESGGRLVQAGDSLRLSCAASGGTVRNYAMGWFRQAPGQEREILSSITRTDNITYYEDSVKGRFTIVRDTAKNTVYLQMNSLKPEDTAVYYCAAAMTHFAVLEREYGYWGQGTQVTVSSGGGGSGGGSEVQLVESGGGLVQPGNSLRLSCAASGFTFSSFGMSWVRQAPGKGLEWVSSISGSGSDTLYADSVKGRFTISRDNAKTTLYLQMNSLRPEDTAVYYCTIGGSLSRSSQGTLVTVSS

SEQ ID NO: 611 - protein, 247 aa, Artificial
  Nanobody sequence
EVQLVESGGGLVQPGNSLRLSCAASGFTFSSFGMSWVRQAPGKGLEWVSSISGSGSDTLYADSVKGRFTISRDNAKTTLYLQMNSLRPEDTAVYYCTIGGSLSRSSQGTLVTVSSGGGGSGGGSEVQLVESGGRLVQAGDSLRLSCAASGGTVRNYAMGWFRQAPGQEREILSSITRTDNITYYEDSVKGRFTIVRDTAKNTVYLQMNSLKPEDTAVYYCAAAMTHFAVLEREYGYWGQGTQVTVSS

SEQ ID NO: 612 - protein, 250 aa, Artificial
  Nanobody sequence
EVQLVESGGGLVQAGGSLRLSCAASGRTISSYTMGWFRQAPGKEREFVAAGTWSTSVTEYADSVKGRFTISRDTAKNTLYLQMNSLKPEDTAVYYCAAEPYIPVRTMRHMTFLTYWGQGTQVTVSSGGGGSGGGSEVQLVESGGGLVQPGNSLRLSCAASGFTFSSFGMSWVRQAPGKGLEWVSSISGSGSDTLYADSVKGRFTISRDNAKTTLYLQMNSLRPEDTAVYYCTIGGSLSRSSQGTLVTVSS

SEQ ID NO: 613 - protein, 250 aa, Artificial
  Nanobody sequence
EVQLVESGGGLVQPGNSLRLSCAASGFTFSSFGMSWVRQAPGKGLEWVSSISGSGSDTLYADSVKGRFTISRDNAKTTLYLQMNSLRPEDTAVYYCTIGGSLSRSSQGTLVTVSSGGGGSGGGSEVQLVESGGGLVQAGGSLRLSCAASGRTISSYTMGWFRQAPGKEREFVAAGTWSTSVTEYADSVKGRFTISRDTAKNTLYLQMNSLKPEDTAVYYCAAEPYIPVRTMRHMTFLTYWGQGTQVTVSS

SEQ ID NO: 614 - protein, 243 aa, Artificial
  Nanobody sequence
EVQLVESGGGLVQAGGSLRLSCAPSGRDISSYIMGWFRQAPGKEREFTADINWNGSWRFYAESVNGRFTISRDNAKNTVYLQMNSLKPEDTAVYYCAAKERGSGAYDYWGQGTQVTVSSGGGGSGGGSEVQLVESGGGLVQPGNSLRLSCAASGFTFSSFGMSWVRQAPGKGLEWVSSISGSGSDTLYADSVKGRFTISRDNAKTTLYLQMNSLRPEDTAVYYCTIGGSLSRSSQGTLVTVSS

SEQ ID NO: 615 - protein, 243 aa, Artificial
  Nanobody sequence
EVQLVESGGGLVQPGNSLRLSCAASGFTFSSFGMSWVRQAPGKGLEWVSSISGSGSDTLYADSVKGRFTISRDNAKTTLYLQMNSLRPEDTAVYYCTIGGSLSRSSQGTLVTVSSGGGGSGGGSEVQLVESGGGLVQAGGSLRLSCAPSGRDISSYIMGWFRQAPGKEREFTADINWNGSWRFYAESVNGRFTISRDNAKNTVYLQMNSLKPEDTAVYYCAAKERGSGAYDYWGQGTQVTVSS

SEQ ID NO: 616 - protein, 244 aa, Artificial
  Nanobody sequence
EVQLVESGGGLVQAGGSLRLSCTASGRALDTYTVTWFRQTPGKEREFVASNRWNAKPYTTDSVKGRFTISRDNAKNTVYLQMNSLKPEDTAVYYCAADLTTWADGPYRYWGQGTQVTVSSGGGGSGGGSEVQLVESGGGLVQPGNSLRLSCAASGFTFSSFGMSWVRQAPGKGLEWVSSISGSGSDTLYADSVKGRFTISRDNAKTTLYLQMNSLRPEDTAVYYCTIGGSLSRSSQGTLVTVSS

SEQ ID NO: 617 - protein, 244 aa, Artificial
  Nanobody sequence
EVQLVESGGGLVQPGNSLRLSCAASGFTFSSFGMSWVRQAPGKGLEWVSSISGSGSDTLYADSVKGRFTISRDNAKTTLYLQMNSLRPEDTAVYYCTIGGSLSRSSQGTLVTVSSGGGGSGGGSEVQLVESGGGLVQAGGSLRLSCTASGRALDTYTVTWFRQTPGKEREFVASNRWNAKPYTTDSVKGRFTISRDNAKNTVYLQMNSLKPEDTAVYYCAADLTTWADGPYRYWGQGTQVTVSS

SEQ ID NO: 618 - protein, 244 aa, Artificial
  Nanobody sequence
KVQLVESGGGLVQAGGSLRLSCAASGRALDTYTVTWFRQTPGKEREFVASIRWNAKPYTTDSVKGRFTISRDNAKNTVYLQMNSLKPEDTAIYYCAADLTTWADGPYRYWGQGTQVTVSSGGGGSGGGSEVQLVESGGGLVQPGNSLRLSCAASGFTFSSFGMSWVRQAPGKGLEWVSSISGSGSDTLYADSVKGRFTISRDNAKTTLYLQMNSLRPEDTAVYYCTIGGSLSRSSQGTLVTVSS

SEQ ID NO: 619 - protein, 244 aa, Artificial
  Nanobody sequence
EVQLVESGGGLVQPGNSLRLSCAASGFTFSSFGMSWVRQAPGKGLEWVSSISGSGSDTLYADSVKGRFTISRDNAKTTLYLQMNSLRPEDTAVYYCTIGGSLSRSSQGTLVTVSSGGGGSGGGSKVQLVESGGGLVQAGGSLRLSCAASGRALDTYTVTWFRQTPGKEREFVASIRWNAKPYTTDSVKGRFTISRDNAKNTVYLQMNSLKPEDTAIYYCAADLTTWADGPYRYWGQGTQVTVSS

SEQ ID NO: 620 - protein, 244 aa, Artificial
  Nanobody sequence
EVQLVESGGGLVQAGGSLRLSCTASGRALDTYTVTWFRQTPGKEREFVASNRWNAKPYVTDSVKGRFTISRDNAKNTVYLQMNSLKPEDTAVYYCAADLTTWADGPYRYWGQGTQVTVSSGGGGSGGGSEVQLVESGGGLVQPGNSLRLSCAASGFTFSSFGMSWVRQAPGKGLEWVSSISGSGSDTLYADSVKGRFTISRDNAKTTLYLQMNSLRPEDTAVYYCTIGGSLSRSSQGTLVTVSS

SEQ ID NO: 621 - protein, 244 aa, Artificial
  Nanobody sequence
EVQLVESGGGLVQPGNSLRLSCAASGFTFSSFGMSWVRQAPGKGLEWVSSISGSGSDTLYADSVKGRFTISRDNAKTTLYLQMNSLRPEDTAVYYCTIGGSLSRSSQGTLVTVSSGGGGSGGGSEVQLVESGGGLVQAGGSLRLSCTASGRALDTYTVTWFRQTPGKEREFVASNRWNAKPYVTDSVKGRFTISRDNAKNTVYLQMNSLKPEDTAVYYCAADLTTWADGPYRYWGQGTQVTVSS

SEQ ID NO: 622 - protein, 244 aa, Artificial
  Nanobody sequence
EVQLVESGGGLVQAGGSLRLSCAASGRALDTYTVTWFRQTPGKEREFVASDRWNAKPYTTDSVKGRFTISRDNAKNTVYLQMNSLKPEDTAVYYCAADLTTWADGPYRFWGQGTQVTVSSGGGGSGGGSEVQLVESGGGLVQPGNSLRLSCAASGFTFSSFGMSWVRQAPGKGLEWVSSISGSGSDTLYADSVKGRFTISRDNAKTTLYLQMNSLRPEDTAVYYCTIGGSLSRSSQGTLVTVSS

SEQ ID NO: 623 - protein, 244 aa, Artificial
  Nanobody sequence
EVQLVESGGGLVQPGNSLRLSCAASGFTFSSFGMSWVRQAPGKGLEWVSSISGSGSDTLYADSVKGRFTISRDNAKTTLYLQMNSLRPEDTAVYYCTIGGSLSRSSQGTLVTVSSGGGGSGGGSEVQLVESGGGLVQAGGSLRLSCAASGRALDTYTVTWFRQTPGKEREFVASDRWNAKPYTTDSVKGRFTISRDNAKNTVYLQMNSLKPEDTAVYYCAADLTTWADGPYRFWGQGTQVTVSS

SEQ ID NO: 624 - protein, 244 aa, Artificial
  Nanobody sequence
EVQLVESGGGLVQAGGSLRLSCAASGRALDTYTVTWFRQTPGKGREFLASIRWNAKPYTTDSVKGRFTMSRDNAKNTVYLQMNSLRPEDTAVYYCAADPTTWADGPYRYWGQGTQVTVSSGGGGSGGGSEVQLVESGGGLVQPGNSLRLSCAASGFTFSSFGMSWVRQAPGKGLEWVSSISGSGSDTLYADSVKGRFTISRDNAKTTLYLQMNSLRPEDTAVYYCTIGGSLSRSSQGTLVTVSS

SEQ ID NO: 625 - protein, 244 aa, Artificial
  Nanobody sequence
EVQLVESGGGLVQPGNSLRLSCAASGFTFSSFGMSWVRQAPGKGLEWVSSISGSGSDTLYADSVKGRFTISRDNAKTTLYLQMNSLRPEDTAVYYCTIGGSLSRSSQGTLVTVSSGGGGSGGGSEVQLVESGGGLVQAGGSLRLSCAASGRALDTYTVTWFRQTPGKGREFLASIRWNAKPYTTDSVKGRFTMSRDNAKNTVYLQMNSLRPEDTAVYYCAADPTTWADGPYRYWGQGTQVTVSS

SEQ ID NO: 626 - protein, 244 aa, Artificial
  Nanobody sequence
EVQLVESGGGLVQPGGSLRLSCAASGRALDTYTVTWFRQTPGKTREFVASVRWNAKPYTTDSVKGRFTISRDNAKNTVYLQMNSLKPEDTAVYYCAADPTTWADGPYRYWGQGTQVTVSSGGGGSGGGSEVQLVESGGGLVQPGNSLRLSCAASGFTFSSFGMSWVRQAPGKGLEWVSSISGSGSDTLYADSVKGRFTISRDNAKTTLYLQMNSLRPEDTAVYYCTIGGSLSRSSQGTLVTVSS

SEQ ID NO: 627 - protein, 244 aa, Artificial
  Nanobody sequence
EVQLVESGGGLVQPGNSLRLSCAASGFTFSSFGMSWVRQAPGKGLEWVSSISGSGSDTLYADSVKGRFTISRDNAKTTLYLQMNSLRPEDTAVYYCTIGGSLSRSSQGTLVTVSSGGGGSGGGSEVQLVESGGGLVQPGGSLRLSCAASGRALDTYTVTWFRQTPGKTREFVASVRWNAKPYTTDSVKGRFTISRDNAKNTVYLQMNSLKPEDTAVYYCAADPTTWADGPYRYWGQGTQVTVSS

SEQ ID NO: 628 - protein, 244 aa, Artificial
  Nanobody sequence
EVHLVESGGGLVQAGGSLRLSCAASGRALDTYTVTWFRQTPGKTREFVASVRWNAKPYTTDSVKGRFTISRDNAKNTVYLQMNSLKPEDTAVYYCAADPTTWADGPYRYWGQGTQVTVSSGGGGSGGGSEVQLVESGGGLVQPGNSLRLSCAASGFTFSSFGMSWVRQAPGKGLEWVSSISGSGSDTLYADSVKGRFTISRDNAKTTLYLQMNSLRPEDTAVYYCTIGGSLSRSSQGTLVTVSS

SEQ ID NO: 629 - protein, 244 aa, Artificial
  Nanobody sequence
EVQLVESGGGLVQPGNSLRLSCAASGFTFSSFGMSWVRQAPGKGLEWVSSISGSGSDTLYADSVKGRFTISRDNAKTTLYLQMNSLRPEDTAVYYCTIGGSLSRSSQGTLVTVSSGGGGSGGGSEVHLVESGGGLVQAGGSLRLSCAASGRALDTYTVTWFRQTPGKTREFVASVRWNAKPYTTDSVKGRFTISRDNAKNTVYLQMNSLKPEDTAVYYCAADPTTWADGPYRYWGQGTQVTVSS

SEQ ID NO: 630 - protein, 250 aa, Artificial
  Nanobody sequence
EVQLVESGGGLVQPGGSLRLSCAASGFTLDYYGIGWFRQAPGKEREWVSCISSSGGSTYYADSVKGRFTISRDNAKNTVYLQMNSLKPEDTAVYYCAAQKGTPPLGCPAYYGMDYWGKGTLVTVSSGGGGSGGGSEVQLVESGGGLVQPGNSLRLSCAASGFTFSSFGMSWVRQAPGKGLEWVSSISGSGSDTLYADSVKGRFTISRDNAKTTLYLQMNSLRPEDTAVYYCTIGGSLSRSSQGTLVTVSS

SEQ ID NO: 631 - protein, 250 aa, Artificial
  Nanobody sequence
EVQLVESGGGLVQPGNSLRLSCAASGFTFSSFGMSWVRQAPGKGLEWVSSISGSGSDTLYADSVKGRFTISRDNAKTTLYLQMNSLRPEDTAVYYCTIGGSLSRSSQGTLVTVSSGGGGSGGGSEVQLVESGGGLVQPGGSLRLSCAASGFTLDYYGIGWFRQAPGKEREWVSCISSSGGSTYYADSVKGRFTISRDNAKNTVYLQMNSLKPEDTAVYYCAAQKGTPPLGCPAYYGMDYWGKGTLVTVSS

SEQ ID NO: 632 - protein, 250 aa, Artificial
  Nanobody sequence
EVQLVESGGGLVQPGGSLRLSCAASGFTLDYYGIGWFRQAPGKEREWVSCISSSGGSTYYADSVKGRFTISRDNAKNTVYLQMNSLKPEDAAVYYCAAQKGTPPLGCPAYYGMDYWGKGTLVTVSSGGGGSGGGSEVQLVESGGGLVQPGNSLRLSCAASGFTFSSFGMSWVRQAPGKGLEWVSSISGSGSDTLYADSVKGRFTISRDNAKTTLYLQMNSLRPEDTAVYYCTIGGSLSRSSQGTLVTVSS

SEQ ID NO: 633 - protein, 250 aa, Artificial
  Nanobody sequence
EVQLVESGGGLVQPGNSLRLSCAASGFTFSSFGMSWVRQAPGKGLEWVSSISGSGSDTLYADSVKGRFTISRDNAKTTLYLQMNSLRPEDTAVYYCTIGGSLSRSSQGTLVTVSSGGGGSGGGSEVQLVESGGGLVQPGGSLRLSCAASGFTLDYYGIGWFRQAPGKEREWVSCISSSGGSTYYADSVKGRFTISRDNAKNTVYLQMNSLKPEDAAVYYCAAQKGTPPLGCPAYYGMDYWGKGTLVTVSS

SEQ ID NO: 634 - protein, 250 aa, Artificial
  Nanobody sequence
EVQLVESGGGLVQAGGSLRLSCAASGRTFSGVDVAWFRQAPGKEREFVAALAWSGIRTYYAVSVKGRFTISRGDPNDTVYLQMTSLKPEDTAVYYCATGRASRTSDYYTDRIYDSWGQGAQVTVSSGGGGSGGGSEVQLVESGGGLVQPGNSLRLSCAASGFTFSSFGMSWVRQAPGKGLEWVSSISGSGSDTLYADSVKGRFTISRDNAKTTLYLQMNSLRPEDTAVYYCTIGGSLSRSSQGTLVTVSS

SEQ ID NO: 635 - protein, 250 aa, Artificial
  Nanobody sequence
EVQLVESGGGLVQPGNSLRLSCAASGFTFSSFGMSWVRQAPGKGLEWVSSISGSGSDTLYADSVKGRFTISRDNAKTTLYLQMNSLRPEDTAVYYCTIGGSLSRSSQGTLVTVSSGGGGSGGGSEVQLVESGGGLVQAGGSLRLSCAASGRTFSGVDVAWFRQAPGKEREFVAALAWSGIRTYYAVSVKGRFTISRGDPNDTVYLQMTSLKPEDTAVYYCATGRASRTSDYYTDRIYDSWGQGAQVTVSS

SEQ ID NO: 636 - protein, 250 aa, Artificial
  Nanobody sequence
EVPMVESGGGLVQAGGSLRLSCAASGRTFSGVDVAWFRQAPGKEREFVAALAWSGIRTYYAVSVKGRFTISRGDPNDTVYLQMTSLKPEDTAVYYCATGRASRTSDYYTDRIYDSWGQGAQVTVSSGGGGSGGGSEVQLVESGGGLVQPGNSLRLSCAASGFTFSSFGMSWVRQAPGKGLEWVSSISGSGSDTLYADSVKGRFTISRDNAKTTLYLQMNSLRPEDTAVYYCTIGGSLSRSSQGTLVTVSS

SEQ ID NO: 637 - protein, 250 aa, Artificial
  Nanobody sequence
EVQLVESGGGLVQPGNSLRLSCAASGFTFSSFGMSWVRQAPGKGLEWVSSISGSGSDTLYADSVKGRFTISRDNAKTTLYLQMNSLRPEDTAVYYCTIGGSLSRSSQGTLVTVSSGGGGSGGGSEVPMVESGGGLVQAGGSLRLSCAASGRTFSGVDVAWFRQAPGKEREFVAALAWSGIRTYYAVSVKGRFTISRGDPNDTVYLQMTSLKPEDTAVYYCATGRASRTSDYYTDRIYDSWGQGAQVTVSS

SEQ ID NO: 638 - protein, 250 aa, Artificial
  Nanobody sequence
EVQLVESGGGLVQAGGSLRLSCAASGRTFSGVDVAWFRQATGKEREFVAALAWSGIRTYYAVSVKGRFTISRGDPNDTVYLQMTSLKPEDTAVYYCATGRASRTSDYYTDRIYDSWGQGAQVTVSSGGGGSGGGSEVQLVESGGGLVQPGNSLRLSCAASGFTFSSFGMSWVRQAPGKGLEWVSSISGSGSDTLYADSVKGRFTISRDNAKTTLYLQMNSLRPEDTAVYYCTIGGSLSRSSQGTLVTVSS

SEQ ID NO: 639 - protein, 250 aa, Artificial
  Nanobody sequence
EVQLVESGGGLVQPGNSLRLSCAASGFTFSSFGMSWVRQAPGKGLEWVSSISGSGSDTLYADSVKGRFTISRDNAKTTLYLQMNSLRPEDTAVYYCTIGGSLSRSSQGTLVTVSSGGGGSGGGSEVQLVESGGGLVQAGGSLRLSCAASGRTFSGVDVAWFRQATGKEREFVAALAWSGIRTYYAVSVKGRFTISRGDPNDTVYLQMTSLKPEDTAVYYCATGRASRTSDYYTDRIYDSWGQGAQVTVSS

SEQ ID NO: 640 - protein, 250 aa, Artificial
  Nanobody sequence
EVQLVESGGGLVQAGGSLRLSCAASGRTFSGVDVAWFRQAPGKEREFVAALAWSGIRTYYAVSVKGRFTISRGDPNDTVYLQMTSLKPEDTAVYYCATGRASSTSDYYTDRIYDSWGQGAQVTVSSGGGGSGGGSEVQLVESGGGLVQPGNSLRLSCAASGFTFSSFGMSWVRQAPGKGLEWVSSISGSGSDTLYADSVKGRFTISRDNAKTTLYLQMNSLRPEDTAVYYCTIGGSLSRSSQGTLVTVSS

SEQ ID NO: 641 - protein, 250 aa, Artificial
  Nanobody sequence
EVQLVESGGGLVQPGNSLRLSCAASGFTFSSFGMSWVRQAPGKGLEWVSSISGSGSDTLYADSVKGRFTISRDNAKTTLYLQMNSLRPEDTAVYYCTIGGSLSRSSQGTLVTVSSGGGGSGGGSEVQLVESGGGLVQAGGSLRLSCAASGRTFSGVDVAWFRQAPGKEREFVAALAWSGIRTYYAVSVKGRFTISRGDPNDTVYLQMTSLKPEDTAVYYCATGRASSTSDYYTDRIYDSWGQGAQVTVSS

SEQ ID NO: 642 - protein, 250 aa, Artificial
  Nanobody sequence
EVQLVESGGGLVQAGGSLRLSCAASGRTFSGVDVAWFRQAPGKEREFVAALAWSGIRTYYAVSVKGRFTISRGNPNDTVYLQMTSLKPEDTAVYYCATGRAYRGSDYYTDRIYDSWGQGAQVTVSSGGGGSGGGSEVQLVESGGGLVQPGNSLRLSCAASGFTFSSFGMSWVRQAPGKGLEWVSSISGSGSDTLYADSVKGRFTISRDNAKTTLYLQMNSLRPEDTAVYYCTIGGSLSRSSQGTLVTVSS

SEQ ID NO: 643 - protein, 250 aa, Artificial
  Nanobody sequence
EVQLVESGGGLVQPGNSLRLSCAASGFTFSSFGMSWVRQAPGKGLEWVSSISGSGSDTLYADSVKGRFTISRDNAKTTLYLQMNSLRPEDTAVYYCTIGGSLSRSSQGTLVTVSSGGGGSGGGSEVQLVESGGGLVQAGGSLRLSCAASGRTFSGVDVAWFRQAPGKEREFVAALAWSGIRTYYAVSVKGRFTISRGNPNDTVYLQMTSLKPEDTAVYYCATGRAYRGSDYYTDRIYDSWGQGAQVTVSS

SEQ ID NO: 644 - protein, 247 aa, Artificial
  Nanobody sequence
EVQLVESGGGLVQPGGSLRLSCAASGRALSSYSVGWFRQAPGKEREFVTAISWSVPYYADSVKGRFTISRDNAKNTVYLQMNSLKPEDTAVYYCAADSLYWRSSRMATDYDYWGQGTQVTVSSGGGGSGGGSEVQLVESGGGLVQPGNSLRLSCAASGFTFSSFGMSWVRQAPGKGLEWVSSISGSGSDTLYADSVKGRFTISRDNAKTTLYLQMNSLRPEDTAVYYCTIGGSLSRSSQGTLVTVSS

SEQ ID NO: 645 - protein, 247 aa, Artificial
  Nanobody sequence
EVQLVESGGGLVQPGNSLRLSCAASGFTFSSFGMSWVRQAPGKGLEWVSSISGSGSDTLYADSVKGRFTISRDNAKTTLYLQMNSLRPEDTAVYYCTIGGSLSRSSQGTLVTVSSGGGGSGGGSEVQLVESGGGLVQPGGSLRLSCAASGRALSSYSVGWFRQAPGKEREFVTAISWSVPYYADSVKGRFTISRDNAKNTVYLQMNSLKPEDTAVYYCAADSLYWRSSRMATDYDYWGQGTQVTVSS

SEQ ID NO: 646 - protein, 249 aa, Artificial
  Nanobody sequence
EVQLVESGGGLVQAGGALRLSCAASGRTFETYRMGWFRQAPGKEREFVALINWSSGTTVYADSVKGRFTISGDNAKDTVYLEMNSLKPEDTAVYYCAVGRRWSGSYYSALAYQYWGQGTQVTVSSGGGGSGGGSEVQLVESGGGLVQPGNSLRLSCAASGFTFSSFGMSWVRQAPGKGLEWVSSISGSGSDTLYADSVKGRFTISRDNAKTTLYLQMNSLRPEDTAVYYCTIGGSLSRSSQGTLVTVSS

SEQ ID NO: 647 - protein, 249 aa, Artificial
  Nanobody sequence
EVQLVESGGGLVQPGNSLRLSCAASGFTFSSFGMSWVRQAPGKGLEWVSSISGSGSDTLYADSVKGRFTISRDNAKTTLYLQMNSLRPEDTAVYYCTIGGSLSRSSQGTLVTVSSGGGGSGGGSEVQLVESGGGLVQAGGALRLSCAASGRTFETYRMGWFRQAPGKEREFVALINWSSGTTVYADSVKGRFTISGDNAKDTVYLEMNSLKPEDTAVYYCAVGRRWSGSYYSALAYQYWGQGTQVTVSS

SEQ ID NO: 648 - protein, 249 aa, Artificial
  Nanobody sequence
EVQLVESGGGLVQAGGALRLSCAASGRTFETYRMGWFRQAPGKEREFVALINWSSGTTIYADSVKGRFTISGDNAKDTVYLEMNSLKPEDTAVYYCAVGRRWSGSYYSALAYQYWGQGTQVTVSSGGGGSGGGSEVQLVESGGGLVQPGNSLRLSCAASGFTFSSFGMSWVRQAPGKGLEWVSSISGSGSDTLYADSVKGRFTISRDNAKTTLYLQMNSLRPEDTAVYYCTIGGSLSRSSQGTLVTVSS

SEQ ID NO: 649 - protein, 249 aa, Artificial
  Nanobody sequence
EVQLVESGGGLVQPGNSLRLSCAASGFTFSSFGMSWVRQAPGKGLEWVSSISGSGSDTLYADSVKGRFTISRDNAKTTLYLQMNSLRPEDTAVYYCTIGGSLSRSSQGTLVTVSSGGGGSGGGSEVQLVESGGGLVQAGGALRLSCAASGRTFETYRMGWFRQAPGKEREFVALINWSSGTTIYADSVKGRFTISGDNAKDTVYLEMNSLKPEDTAVYYCAVGRRWSGSYYSALAYQYWGQGTQVTVSS

SEQ ID NO: 650 - protein, 249 aa, Artificial
  Nanobody sequence
EVQLVESGGGLVQAGGALRLSCAASGRTFETYRMGWFRQAPGKEREFVALINWSSGTTIYADSVKGRFTISGDNAKDTVYLEMNSLKPEDTAVYYCAVGRRWSGSYYSALAYQYWGKGTQVTVSSGGGGSGGGSEVQLVESGGGLVQPGNSLRLSCAASGFTFSSFGMSWVRQAPGKGLEWVSSISGSGSDTLYADSVKGRFTISRDNAKTTLYLQMNSLRPEDTAVYYCTIGGSLSRSSQGTLVTVSS

SEQ ID NO: 651 - protein, 249 aa, Artificial
  Nanobody sequence
EVQLVESGGGLVQPGNSLRLSCAASGFTFSSFGMSWVRQAPGKGLEWVSSISGSGSDTLYADSVKGRFTISRDNAKTTLYLQMNSLRPEDTAVYYCTIGGSLSRSSQGTLVTVSSGGGGSGGGSEVQLVESGGGLVQAGGALRLSCAASGRTFETYRMGWFRQAPGKEREFVALINWSSGTTIYADSVKGRFTISGDNAKDTVYLEMNSLKPEDTAVYYCAVGRRWSGSYYSALAYQYWGKGTQVTVSS

SEQ ID NO: 652 - protein, 249 aa, Artificial
  Nanobody sequence
EVQLVESGGGLVHAGGALRLSCAASGRAFETYRMGWFRQAPGKEREFVALINWSSGTTVYADSVKGRFTISGDNAKDTVYLEMNSLKPEDTAVYYCAVGRRWSGSYYSALAYQYWGQGTQVTVSSGGGGSGGGSEVQLVESGGGLVQPGNSLRLSCAASGFTFSSFGMSWVRQAPGKGLEWVSSISGSGSDTLYADSVKGRFTISRDNAKTTLYLQMNSLRPEDTAVYYCTIGGSLSRSSQGTLVTVSS

SEQ ID NO: 653 - protein, 249 aa, Artificial
  Nanobody sequence
EVQLVESGGGLVQPGNSLRLSCAASGFTFSSFGMSWVRQAPGKGLEWVSSISGSGSDTLYADSVKGRFTISRDNAKTTLYLQMNSLRPEDTAVYYCTIGGSLSRSSQGTLVTVSSGGGGSGGGSEVQLVESGGGLVHAGGALRLSCAASGRAFETYRMGWFRQAPGKEREFVALINWSSGTTVYADSVKGRFTISGDNAKDTVYLEMNSLKPEDTAVYYCAVGRRWSGSYYSALAYQYWGQGTQVTVSS

SEQ ID NO: 654 - protein, 249 aa, Artificial
  Nanobody sequence
EVQLVESGGGLVQAGGALRPSCAASGRTFETYRMGWFRQAPGKEREFVALINWSSGTTVYADSVKGRFTISGDNAKDTVYLEMNSLKPEDTAVYYCAVGRRWSGSYYSALAYQYWGQGTQVTVSSGGGGSGGGSEVQLVESGGGLVQPGNSLRLSCAASGFTFSSFGMSWVRQAPGKGLEWVSSISGSGSDTLYADSVKGRFTISRDNAKTTLYLQMNSLRPEDTAVYYCTIGGSLSRSSQGTLVTVSS

SEQ ID NO: 655 - protein, 249 aa, Artificial
  Nanobody sequence
EVQLVESGGGLVQPGNSLRLSCAASGFTFSSFGMSWVRQAPGKGLEWVSSISGSGSDTLYADSVKGRFTISRDNAKTTLYLQMNSLRPEDTAVYYCTIGGSLSRSSQGTLVTVSSGGGGSGGGSEVQLVESGGGLVQAGGALRPSCAASGRTFETYRMGWFRQAPGKEREFVALINWSSGTTVYADSVKGRFTISGDNAKDTVYLEMNSLKPEDTAVYYCAVGRRWSGSYYSALAYQYWGQGTQVTVSS

SEQ ID NO: 656 - protein, 249 aa, Artificial
  Nanobody sequence
EVQLVESGGGLVQAGGALRLSCAVSGRTFESYRMGWFRQAPGKEREFVSLINWSSGKTIYADSVKGRFTISGDNAKDTVYLEMNSLKPEDTAVYYCAVGRAWSGSYYSALAYQYWGQGTQVTVSSGGGGSGGGSEVQLVESGGGLVQPGNSLRLSCAASGFTFSSFGMSWVRQAPGKGLEWVSSISGSGSDTLYADSVKGRFTISRDNAKTTLYLQMNSLRPEDTAVYYCTIGGSLSRSSQGTLVTVSS

SEQ ID NO: 657 - protein, 249 aa, Artificial
  Nanobody sequence
EVQLVESGGGLVQPGNSLRLSCAASGFTFSSFGMSWVRQAPGKGLEWVSSISGSGSDTLYADSVKGRFTISRDNAKTTLYLQMNSLRPEDTAVYYCTIGGSLSRSSQGTLVTVSSGGGGSGGGSEVQLVESGGGLVQAGGALRLSCAVSGRTFESYRMGWFRQAPGKEREFVSLINWSSGKTIYADSVKGRFTISGDNAKDTVYLEMNSLKPEDTAVYYCAVGRAWSGSYYSALAYQYWGQGTQVTVSS

SEQ ID NO: 658 - protein, 249 aa, Artificial
  Nanobody sequence
EVQLVESGGGLVQAGGALRLSCAASGRTFETYRMGWFRQAPGKEREFVALINWSSGITVYLDSVKGRFTISGDNAKDTVYLEMNSLKPEDTAVYYCAVGRAWSGSYYSALAYQYWGQGTQVTVSSGGGGSGGGSEVQLVESGGGLVQPGNSLRLSCAASGFTFSSFGMSWVRQAPGKGLEWVSSISGSGSDTLYADSVKGRFTISRDNAKTTLYLQMNSLRPEDTAVYYCTIGGSLSRSSQGTLVTVSS

SEQ ID NO: 659 - protein, 249 aa, Artificial
  Nanobody sequence
EVQLVESGGGLVQPGNSLRLSCAASGFTFSSFGMSWVRQAPGKGLEWVSSISGSGSDTLYADSVKGRFTISRDNAKTTLYLQMNSLRPEDTAVYYCTIGGSLSRSSQGTLVTVSSGGGGSGGGSEVQLVESGGGLVQAGGALRLSCAASGRTFETYRMGWFRQAPGKEREFVALINWSSGITVYLDSVKGRFTISGDNAKDTVYLEMNSLKPEDTAVYYCAVGRAWSGSYYSALAYQYWGQGTQVTVSS

SEQ ID NO: 660 - protein, 249 aa, Artificial
  Nanobody sequence
EVQLMESGGGLVQAGGSLRLSCAVSGRTFESYRMGWFRQAPGKEREFVSLINWSSGKTIYADSVKGRFTISGDNAKDTVYLEMNSLKPEDTAVYYCAVGRAWSGSYYSALAYQYWGQGTQVTVSSGGGGSGGGSEVQLVESGGGLVQPGNSLRLSCAASGFTFSSFGMSWVRQAPGKGLEWVSSISGSGSDTLYADSVKGRFTISRDNAKTTLYLQMNSLRPEDTAVYYCTIGGSLSRSSQGTLVTVSS

SEQ ID NO: 661 - protein, 249 aa, Artificial
  Nanobody sequence
EVQLVESGGGLVQPGNSLRLSCAASGFTFSSFGMSWVRQAPGKGLEWVSSISGSGSDTLYADSVKGRFTISRDNAKTTLYLQMNSLRPEDTAVYYCTIGGSLSRSSQGTLVTVSSGGGGSGGGSEVQLMESGGGLVQAGGSLRLSCAVSGRTFESYRMGWFRQAPGKEREFVSLINWSSGKTIYADSVKGRFTISGDNAKDTVYLEMNSLKPEDTAVYYCAVGRAWSGSYYSALAYQYWGQGTQVTVSS

SEQ ID NO: 662 - protein, 249 aa, Artificial
  Nanobody sequence
EVQLVESGGGSVQAGGALRLSCAVSGRTFESYRMGWFRQAPGKEREFVSLINWSSGKTIYADSVKGRFTISGDNAKDTVYLEMNSLKPEDTAVYYCAVGRAWSGSHYSALAYQYWGQGTQVTVSSGGGGSGGGSEVQLVESGGGLVQPGNSLRLSCAASGFTFSSFGMSWVRQAPGKGLEWVSSISGSGSDTLYADSVKGRFTISRDNAKTTLYLQMNSLRPEDTAVYYCTIGGSLSRSSQGTLVTVSS

SEQ ID NO: 663 - protein, 249 aa, Artificial
  Nanobody sequence
EVQLVESGGGLVQPGNSLRLSCAASGFTFSSFGMSWVRQAPGKGLEWVSSISGSGSDTLYADSVKGRFTISRDNAKTTLYLQMNSLRPEDTAVYYCTIGGSLSRSSQGTLVTVSSGGGGSGGGSEVQLVESGGGSVQAGGALRLSCAVSGRTFESYRMGWFRQAPGKEREFVSLINWSSGKTIYADSVKGRFTISGDNAKDTVYLEMNSLKPEDTAVYYCAVGRAWSGSHYSALAYQYWGQGTQVTVSS

SEQ ID NO: 664 - protein, 250 aa, Artificial
  Nanobody sequence
EVQLVESGGGLVQTGGSLRLSCAASGRTFGTYAMAWFRQSPKNEREFVATLRWSDGSTYYADSVKGRFTIAGDNAKNTVYLQMNNLKPEDTAVYYCAADRWFSYTTYDATDTWHYWGQGTQVTVSSGGGGSGGGSEVQLVESGGGLVQPGNSLRLSCAASGFTFSSFGMSWVRQAPGKGLEWVSSISGSGSDTLYADSVKGRFTISRDNAKTTLYLQMNSLRPEDTAVYYCTIGGSLSRSSQGTLVTVSS

SEQ ID NO: 665 - protein, 250 aa, Artificial
  Nanobody sequence
EVQLVESGGGLVQPGNSLRLSCAASGFTFSSFGMSWVRQAPGKGLEWVSSISGSGSDTLYADSVKGRFTISRDNAKTTLYLQMNSLRPEDTAVYYCTIGGSLSRSSQGTLVTVSSGGGGSGGGSEVQLVESGGGLVQTGGSLRLSCAASGRTFGTYAMAWFRQSPKNEREFVATLRWSDGSTYYADSVKGRFTIAGDNAKNTVYLQMNNLKPEDTAVYYCAADRWFSYTTYDATDTWHYWGQGTQVTVSS

SEQ ID NO: 666 - protein, 371 aa, Artificial
  Nanobody sequence
EVQLVESGGGLVQPGNSLRLSCAASGFTFSSFGMSWVRQAPGKGLEWVSSISGSGSDTLYADSVKGRFTISRDNAKTTLYLQMNSLRPEDTAVYYCTIGGSLSRSSQGTLVTVSSGGGGSGGGSEVQLVESGGGLVQAGGSLRLSCAPSGRDISSYIMGWFRQAPGKEREFTADINWNGSWRFYAESVNGRFTISRDNAKNTVYLQMNSLKPEDTAVYYCAAKERGSGAYDYWGQGTQVTVSSGGGGSGGGSEVQLVESGGGLVQAGGSLRLSCAPSGRDISSYIMGWFRQAPGKEREFTADINWNGSWRFYAESVNGRFTISRDNAKNTVYLQMNSLKPEDTAVYYCAAKERGSGAYDYWGQGTQVTVSS

SEQ ID NO: 667 - protein, 392 aa, Artificial
  Nanobody sequence
EVQLVESGGGLVQAGGSLRLSCAPSGRDISSYIMGWFRQAPGKEREFTADINWNGSWRFYAESVNGRFTISRDNAKNTVYLQMNSLKPEDTAVYYCAAKERGSGAYDYWGQGTQVTVSSGGGGSGGGGSGGGGSGGGGSGGGGSGGGGSEVQLVESGGGLVQPGNSLRLSCAASGFTFSSFGMSWVRQAPGKGLEWVSSISGSGSDTLYADSVKGRFTISRDNAKTTLYLQMNSLRPEDTAVYYCTIGGSLSRSSQGTLVTVSSGGGGSGGGSEVQLVESGGGLVQAGGSLRLSCAPSGRDISSYIMGWFRQAPGKEREFTADINWNGSWRFYAESVNGRFTISRDNAKNTVYLQMNSLKPEDTAVYYCAAKERGSGAYDYWGQGTQVTVSS

SEQ ID NO: 668 - protein, 392 aa, Artificial
  Nanobody sequence
EVQLVESGGGLVQAGGSLRLSCAPSGRDISSYIMGWFRQAPGKEREFTADINWNGSWRFYAESVNGRFTISRDNAKNTVYLQMNSLKPEDTAVYYCAAKERGSGAYDYWGQGTQVTVSSGGGGSGGGSEVQLVESGGGLVQAGGSLRLSCAPSGRDISSYIMGWFRQAPGKEREFTADINWNGSWRFYAESVNGRFTISRDNAKNTVYLQMNSLKPEDTAVYYCAAKERGSGAYDYWGQGTQVTVSSGGGGSGGGGSGGGGSGGGGSGGGGSGGGGSEVQLVESGGGLVQPGNSLRLSCAASGFTFSSFGMSWVRQAPGKGLEWVSSISGSGSDTLYADSVKGRFTISRDNAKTTLYLQMNSLRPEDTAVYYCTIGGSLSRSSQGTLVTVSS

SEQ ID NO: 669 - protein, 405 aa, Artificial
  Nanobody sequence
EVQLVESGGGLVQPGNSLRLSCAASGFTFSSFGMSWVRQAPGKGLEWVSSISGSGSDTLYADSVKGRFTISRDNAKTTLYLQMNSLRPEDTAVYYCTIGGSLSRSSQGTLVTVSSGGGGSGGGGSGGGGSGGGGSGGGGSGGGGSEVQLVESGGGLVQPGGSLRLSCAASGFTVSSYTMYWARQAPGKELEWVSIIFTNGEGTYYSDSVKGRFTVSRDNAKNTLYLQMNSLKPEDTALYYCARDPFGKLKGQGTQVTVSSGGGGSGGGGSGGGGSGGGGSGGGGSGGGGSEVQLVESGGGLVQPGGSLRLSCAASGFTVSSYTMYWARQAPGKELEWVSIIFTNGEGTYYSDSVKGRFTVSRDNAKNTLYLQMNSLKPEDTALYYCARDPFGKLKGQGTQVTVSS

SEQ ID NO: 670 - protein, 363 aa, Artificial
  Nanobody sequence
EVQLVESGGGLVQPGGSLRLSCAASGFTVSSYTMYWARQAPGKELEWVSIIFTNGEGTYYSDSVKGRFTVSRDNAKNTLYLQMNSLKPEDTALYYCARDPFGKLKGQGTQVTVSSGGGGSGGGSEVQLVESGGGLVQPGNSLRLSCAASGFTFSSFGMSWVRQAPGKGLEWVSSISGSGSDTLYADSVKGRFTISRDNAKTTLYLQMNSLRPEDTAVYYCTIGGSLSRSSQGTLVTVSSGGGGSGGGSEVQLVESGGGLVQPGGSLRLSCAASGFTVSSYTMYWARQAPGKELEWVSIIFTNGEGTYYSDSVKGRFTVSRDNAKNTLYLQMNSLKPEDTALYYCARDPFGKLKGQGTQVTVSS

SEQ ID NO: 671 - protein, 384 aa, Artificial
  Nanobody sequence
EVQLVESGGGLVQPGGSLRLSCAASGFTVSSYTMYWARQAPGKELEWVSIIFTNGEGTYYSDSVKGRFTVSRDNAKNTLYLQMNSLKPEDTALYYCARDPFGKLKGQGTQVTVSSGGGGSGGGGSGGGGSGGGGSGGGGSGGGGSEVQLVESGGGLVQPGGSLRLSCAASGFTVSSYTMYWARQAPGKELEWVSIIFTNGEGTYYSDSVKGRFTVSRDNAKNTLYLQMNSLKPEDTALYYCARDPFGKLKGQGTQVTVSSGGGGSGGGSEVQLVESGGGLVQPGNSLRLSCAASGFTFSSFGMSWVRQAPGKGLEWVSSISGSGSDTLYADSVKGRFTISRDNAKTTLYLQMNSLRPEDTAVYYCTIGGSLSRSSQGTLVTVSS

SEQ ID NO: 672 - protein, 384 aa, Artificial
  Nanobody sequence
EVQLVESGGGLVQPGNSLRLSCAASGFTFSSFGMSWVRQAPGKGLEWVSSISGSGSDTLYADSVKGRFTISRDNAKTTLYLQMNSLRPEDTAVYYCTIGGSLSRSSQGTLVTVSSGGGGSGGGSEVQLVESGGGLVQPGGSLRLSCAASGFTFSNYWMYWLRQAPGKGLESVSSINTGGARTFYADSVKGRFTISRDNAKNTLYLQMNSLKSEDTAVYYCAKDAAGRTRGQGTQVTVSSGGGGSGGGGSGGGGSGGGGSGGGGSGGGGSEVQLVESGGGLVQPGGSLRLSCAASGFTFSNYWMYWLRQAPGKGLESVSSINTGGARTFYADSVKGRFTISRDNAKNTLYLQMNSLKSEDTAVYYCAKDAAGRTRGQGTQVTVSS

SEQ ID NO: 673 - protein, 405 aa, Artificial
  Nanobody sequence
EVQLVESGGGLVQPGGSLRLSCAASGFTFSNYWMYWLRQAPGKGLESVSSINTGGARTFYADSVKGRFTISRDNAKNTLYLQMNSLKSEDTAVYYCAKDAAGRTRGQGTQVTVSSGGGGSGGGGSGGGGSGGGGSGGGGSGGGGSEVQLVESGGGLVQPGNSLRLSCAASGFTFSSFGMSWVRQAPGKGLEWVSSISGSGSDTLYADSVKGRFTISRDNAKTTLYLQMNSLRPEDTAVYYCTIGGSLSRSSQGTLVTVSSGGGGSGGGGSGGGGSGGGGSGGGGSGGGGSEVQLVESGGGLVQPGGSLRLSCAASGFTFSNYWMYWLRQAPGKGLESVSSINTGGARTFYADSVKGRFTISRDNAKNTLYLQMNSLKSEDTAVYYCAKDAAGRTRGQGTQVTVSS

SEQ ID NO: 674 - protein, 363 aa, Artificial
  Nanobody sequence
EVQLVESGGGLVQPGGSLRLSCAASGFTFSNYWMYWLRQAPGKGLESVSSINTGGARTFYADSVKGRFTISRDNAKNTLYLQMNSLKSEDTAVYYCAKDAAGRTRGQGTQVTVSSGGGGSGGGSEVQLVESGGGLVQPGGSLRLSCAASGFTFSNYWMYWLRQAPGKGLESVSSINTGGARTFYADSVKGRFTISRDNAKNTLYLQMNSLKSEDTAVYYCAKDAAGRTRGQGTQVTVSSGGGGSGGGSEVQLVESGGGLVQPGNSLRLSCAASGFTFSSFGMSWVRQAPGKGLEWVSSISGSGSDTLYADSVKGRFTISRDNAKTTLYLQMNSLRPEDTAVYYCTIGGSLSRSSQGTLVTVSS

SEQ ID NO: 675 - protein, 415 aa, Artificial
  Nanobody sequence
EVQLVESGGGLVQPGNSLRLSCAASGFTFSSFGMSWVRQAPGKGLEWVSSISGSGSDTLYADSVKGRFTISRDNAKTTLYLQMNSLRPEDTAVYYCTIGGSLSRSSQGTLVTVSSGGGGSGGGGSGGGGSGGGGSGGGGSGGGGSEVQLVESGGGLVQAGGSLRLSCTASGRALDTYTVTWFRQTPGKEREFVASNRWNAKPYTTDSVKGRFTISRDNAKNTVYLQMNSLKPEDTAVYYCAADLTTWADGPYRYWGQGTQVTVSSGGGGSGGGGSGGGGSGGGGSGGGGSGGGGSEVQLVESGGGLVQAGGSLRLSCTASGRALDTYTVTWFRQTPGKEREFVASNRWNAKPYTTDSVKGRFTISRDNAKNTVYLQMNSLKPEDTAVYYCAADLTTWADGPYRYWGQGTQVTVSS

SEQ ID NO: 676 - protein, 373 aa, Artificial
  Nanobody sequence
EVQLVESGGGLVQAGGSLRLSCTASGRALDTYTVTWFRQTPGKEREFVASNRWNAKPYTTDSVKGRFTISRDNAKNTVYLQMNSLKPEDTAVYYCAADLTTWADGPYRYWGQGTQVTVSSGGGGSGGGSEVQLVESGGGLVQPGNSLRLSCAASGFTFSSFGMSWVRQAPGKGLEWVSSISGSGSDTLYADSVKGRFTISRDNAKTTLYLQMNSLRPEDTAVYYCTIGGSLSRSSQGTLVTVSSGGGGSGGGSEVQLVESGGGLVQAGGSLRLSCTASGRALDTYTVTWFRQTPGKEREFVASNRWNAKPYTTDSVKGRFTISRDNAKNTVYLQMNSLKPEDTAVYYCAADLTTWADGPYRYWGQGTQVTVSS

SEQ ID NO: 677 - protein, 394 aa, Artificial
  Nanobody sequence
EVQLVESGGGLVQAGGSLRLSCTASGRALDTYTVTWFRQTPGKEREFVASNRWNAKPYTTDSVKGRFTISRDNAKNTVYLQMNSLKPEDTAVYYCAADLTTWADGPYRYWGQGTQVTVSSGGGGSGGGGSGGGGSGGGGSGGGGSGGGGSEVQLVESGGGLVQAGGSLRLSCTASGRALDTYTVTWFRQTPGKEREFVASNRWNAKPYTTDSVKGRFTISRDNAKNTVYLQMNSLKPEDTAVYYCAADLTTWADGPYRYWGQGTQVTVSSGGGGSGGGSEVQLVESGGGLVQPGNSLRLSCAASGFTFSSFGMSWVRQAPGKGLEWVSSISGSGSDTLYADSVKGRFTISRDNAKTTLYLQMNSLRPEDTAVYYCTIGGSLSRSSQGTLVTVSS

SEQ ID NO: 678 - protein, 9 aa, Artificial
  Linker sequence
GGGGSGGGS

SEQ ID NO: 679 - protein, 30 aa, Artificial
  Linker sequence
GGGGSGGGGSGGGGSGGGGSGGGGSGGGGS

SEQ ID NO: 680 - protein, 109 aa, Artificial
  VEGF109 sequence
APMAEGGGQNHHEVVKFMDVYQRSYCHPIETLVDIFQEYPDEIEYIFKPSCVPLMRCGGCCNDEGLECVPTEESNITMQIMRIKPHQGQHIGEMSFLQHNKCECRPKKD
